(19) United States
(12) Patent Application Publication
(10) Pub. No.: US 2010/0316604 A1
(43) Pub. Date: Dec. 16, 2010

(54) INTERFERON LAMBDA FUSION POLYPEPTIDES

(75) Inventor: Peter ARTYMIUK, Sheffield (GB)

Correspondence Address: SPECKMAN LAW GROUP PLLC, 1201 THIRD AVENUE, SUITE 330, SEATTLE, WA, 98101, US

(73) Assignee: ASTERION LIMITED, Sheffield (GB)

(21) Appl. No.: 12/762,923

(22) Filed: Apr. 19, 2010

Related U.S. Application Data
(60) Provisional application No. 61/249,539, filed on Oct. 7, 2009.

(30) Foreign Application Priority Data
Apr. 21, 2009 (GB) GB0906810.7
Nov. 12, 2009 (GB) 0919753.4

(51) Int. Cl. A61K 38/21; C07K 14/555; C07H 21/00; A61P 35/00; A61P 31/14; A61P 31/20; A61P 31/12; C12N 15/63; C12N 5/10

(52) U.S. Cl. 424/85.4; 530/351; 536/23.4; 435/320.1; 435/325

(57) ABSTRACT

The disclosure relates to interferon lambda fusion polypeptides and dimers; nucleic acid molecules encoding said polypeptides and/or dimers, vectors and transformed cells including such nucleic acid molecules, pharmaceutical compositions including the interferon lambda fusion polypeptides and/or dimers, and methods of treating a disorder in a human subject by administering the polypeptides and/or dimers.

### REFERENCE TO RELATED APPLICATIONS

[0001] This application claims priority to U.S. provisional patent application no. 61/249,539, filed Oct. 7, 2009, and to United Kingdom patent applications no. GB0906810.7, filed Apr. 21, 2009, and GB0919753.4, filed Nov. 12, 2009.

### TECHNICAL FIELD OF THE INVENTION

[0002] The invention relates to interferon λ fusion polypeptides and dimers; nucleic acid molecules encoding said polypeptides and methods of treatment that use said polypeptides/dimers.

### BACKGROUND

[0003] The interferons represent a generic group of cytokines and are classified into three groups; type I, type II and type III. Each of the interferon groups has an associated anti-viral and anti-proliferative activity and therefore recombinant forms are used to treat both viral infection and cancer.

[0004] Type I interferon includes interferon α, interferon β, interferon ε, interferon κ and ω interferon. Interferon α (IFNA) is produced predominantly by B lymphocytes but also by macrophages and can be sub-divided into 13 sub-types. The level of homology between IFNA 1 isotypes is high being around 75-80% identity at the amino acid level. α interferon stimulates the activity of macrophages and Natural Killer (NK) cells to elicit an anti-viral response or an anti-tumour response.

[0005] Type II interferon includes one member, interferon γ and is involved in the regulation of immune and inflammatory responses. In humans interferon γ is encoded by a single gene and is produced by activated T-cells and NK cells. Interferon γ does have anti-viral and anti-tumour activity however this is generally weaker when compared to interferon α. The function of interferon γ is to enhance the effects of Type I interferon by recruiting leukocytes to a site of infection and by stimulating macrophages to engulf invading bacteria during an infection.

[0006] Type III interferon includes three interferon λ proteins referred to as IFN-λ1, IFN-λ2 and IFN-λ3 also known as IL29, IL28A and IL28B. Type III interferons have homology to type I interferons and IL10 and similar biological activity although they do not inhibit division of some B cell lines. Interferon λ1, λ2 and λ3 binds two dissimilar receptors referred to as interferon A receptor [INT-LR1] and interleukin 10 receptor 2 [IL10-R2].

[0007] The isolation and characterization of interferon A polypeptides is described in WO02/086087 and WO2005/023862.

[0008] It is known in the art to modify protein biopharmaceuticals to retard serum clearance. For example, Syed et al [Blood, 89, 3243-3252, (1997)] constructed an anti-coagulant fusion protein which fused hirudin with albumin. This fusion protein showed extended plasma half life whilst maintaining a potent anti-thrombin (anti-coagulant) activity. However a problem associated with this strategy is that hirudin is a foreign protein which is known to provoke a strong immune response. Similarly, blood clotting Factor VII and VIIa has been fused to albumin to extend serum half life [see WO2007/090584 and Weimer et al Thromb Haemost, 99: 659-667, (2008)].

[0009] A further method to increase the effective molecular weight of proteins and to produce a product which has reduced immunogenicity is to coat the protein in polyethylene glycol (PEG). The in-vivo half-life of GH has been increased by conjugating the GH with polyethylene glycol, which is termed “pegylation” [see Abuchowski et al., J. Biol Chem., 252:3582-3586 (1977)]. PEG is typically characterised as a non-immunogenic uncharged polymer. PEG is believed to slow renal clearance by providing increased hydrodynamic volume in pegylated proteins (Maxfield et al., Polymer, 16:505-509 (1975)). U.S. Pat. No. 5,849,535 also describe human GH (hGH) variants which are conjugated to one or more polyols. A problem associated with pegylation of GH is that the affinity of pegylated GH for its receptor is reduced thereby requiring adminstration of high dosage regimes. This also applies to other pegylated proteins, for example granulocyte colony stimulating hormone [GCSF], the interferons, see WO2005/023862 and somatostatin.

### SUMMARY

[0010] This disclosure relates to interferon λ recombinant forms and including glycosylated forms that have improved pharmacokinetics and activity.

[0011] According to an aspect of the invention there is provided a fusion polypeptide comprising:

[0012] the amino acid sequence of an interferon λ, or an amino acid sequence variant thereof, linked, directly or indirectly, to the binding domain of an interferon λ receptor, or an amino acid sequence variant thereof.

[0013] An interferon λ interferon receptor amino sequence variant may differ in amino acid sequence by one or more substitutions, additions, deletions, truncations which may be present in any combination. Among preferred variants are those that vary from a reference polypeptide by substitution of at least one cysteine amino acid residue from either interferon λ and/or the interferon λ receptor. Most highly preferred are variants which retain the same biological function and activity as the reference polypeptide from which it varies. Preferably the variant has improved biological activity.

[0014] In a preferred embodiment of the invention, the variant polypeptide varies by substitution of at least one cysteine amino acid residue wherein said cysteine amino acid is substituted for an amino acid selected from the group consisting of: aspartic acid, glutamic acid, phenylalanine, glycine, histidine, isoleucine, lysine, leucine, methionine, proline, glutamine, arginine, threonine, valine, tryptophan or tyrosine. Preferably said cysteine substitution is for serine, alanine or asparagine.

[0015] In a preferred embodiment of the invention said interferon λ is linked to the binding domain of the of the interferon λ receptor by a peptide linker. Preferably a flexible peptide linker. Preferably said peptide linking molecule comprises at least 1, 2, 3, 4, 5 or 6 copies of the peptide Gly Gly Gly Gly Ser (SEQ ID NO: 188).

[0016] In a preferred embodiment of the invention said peptide linking molecule consists of 4 or 5 copies of the peptide Gly Gly Gly Gly Ser (SEQ ID NO: 188).

[0017] In an alternative preferred embodiment of the invention said peptide linker molecule comprises or consists of one copy of the glycosylation motif Asn-Xaa-Ser or Asn-Xaa-Thr where X is any amino acid except proline.

[0018] In a preferred embodiment of the invention said peptide linker molecule comprises at least 5 amino acid residues.

[0019] In a preferred embodiment of the invention said peptide linker comprises 5-50 amino acid residues.

[0020] In a further preferred embodiment of the invention said peptide linker consists of 5, 10, 15, 20, 25, 30, 35, 40, 45 or 50 amino acid residues.

[0021] In a preferred embodiment of the invention said peptide linker molecule comprises at least one copy of the motif (Xaa₁ Xaa₂ Xaa₃ Xaa₄ Xaa₅; SEQ ID NO: 189) wherein said motif comprises the glycosylation motif Asn-Xaa-Ser or Asn-Xaa-Thr.

[0022] In a preferred embodiment of the invention said peptide linker comprises at least one copy of an amino acid motif selected from the group consisting of:

Asn₁-Xaa₂-Ser₃ Xaa₄ Xaa₅ (SEQ ID NO: 190) wherein Xaa₂ is any amino acid except proline;
Xaa₁ Asn₂-Xaa₃-Ser₄ Xaa₅ (SEQ ID NO: 191) wherein Xaa₃ is any amino acid except proline;
Xaa₁ Xaa₂ Asn₃-Xaa₄-Ser₅ (SEQ ID NO: 192) wherein Xaa₄ is any amino acid except proline;
Asn₁-Xaa₂-Thr₃ Xaa₄ Xaa₅ (SEQ ID NO: 193) wherein Xaa₂ is any amino acid except proline;
Xaa₁ Asn₂-Xaa₃-Thr₄ Xaa₅ (SEQ ID NO: 194) wherein Xaa₃ is any amino acid except proline; and
Xaa₁ Xaa₂ Asn₃-Xaa₄-Thr₅ (SEQ ID NO: 195) wherein Xaa₄ is any amino acid except proline.

[0023] Preferably said peptide linker comprises at least one copy of a motif selected from the group consisting of:

Asn₁-Xaa₂-Ser₃ Gly₄ Ser₅ (SEQ ID NO: 196) wherein Xaa₂ is any amino acid except proline;
Gly₁ Asn₂-Xaa₃-Ser₄ Ser₅ (SEQ ID NO: 197) wherein Xaa₃ is any amino acid except proline;
Gly₁ Gly₂ Asn₃-Xaa₄-Ser₅ (SEQ ID NO: 198) wherein Xaa₄ is any amino acid except proline;
Asn₁-Xaa₂-Thr₃ Gly₄ Ser₅ (SEQ ID NO: 199) wherein Xaa₂ is any amino acid except proline;
Gly₁ Asn₂-Xaa₃-Thr₄ Ser₅ (SEQ ID NO: 200) wherein Xaa₃ is any amino acid except proline; and
Gly₁ Gly₂ Asn₃-Xaa₄-Thr₅ (SEQ ID NO: 201) wherein Xaa₄ is any amino acid except proline.

[0024] In an alternative preferred embodiment of the invention said peptide linker comprises at least one copy of a motif selected from the group consisting of:

Asn₁-Xaa₂-Ser₃ Ser₄ Gly₅ (SEQ ID NO: 202) wherein Xaa₂ is any amino acid except proline;
Ser₁ Asn₂-Xaa₃-Ser₄ Gly₅ (SEQ ID NO: 203) wherein Xaa₃ is any amino acid except proline;
Ser₁ Ser₂ Asn₃-Xaa₄-Ser₅ (SEQ ID NO: 204) wherein Xaa₄ is any amino acid except proline;
Asn₁-Xaa₂-Thr₃ Ser₄ Gly₅ (SEQ ID NO: 205) wherein Xaa₂ is any amino acid except proline;
Ser₁ Asn₂-Xaa₃-Thr₄ Gly₅ (SEQ ID NO: 206) wherein Xaa₃ is any amino acid except proline; and
Ser₁ Ser₂ Asn₃-Xaa₄-Thr₅ (SEQ ID NO: 207) wherein Xaa₄ is any amino acid except proline.

[0025] In a preferred embodiment of the invention said peptide linker molecule comprises at least one copy of the motif (Xaa₁ Xaa₂ Xaa₃ Xaa₄ Xaa₅; SEQ ID NO: 189) wherein said motif comprises the glycosylation motif Asn-Xaa-Ser or Asn-Xaa-Thr and at least one copy of the motif (Gly Gly Gly Gly Ser; SEQ ID NO: 188) wherein said peptide linker is 5-50 amino acids.

[0026] In a preferred embodiment of the invention said peptide linker comprises at least one copy of the motif (Xaa₁ Xaa₂ Xaa₃ Xaa₄ Xaa₅; SEQ ID NO: 189) wherein said motif comprises the glycosylation motif Asn-Xaa-Ser or Asn-Xaa-Thr and a copy of the motif (Ser Ser Ser Ser Gly; SEQ ID NO: 188) wherein said peptide linker is 5-50 amino acids.

[0027] In a preferred embodiment of the invention said fusion polypeptide linker is modified by the addition of at least one sugar selected from the group consisting of: mannose, galactose, n-acetyl glucosamine, n-acetyl neuraminic, acid n-glycolyl neuraminic acid, n-acetyl galactosamine, fucose, glucose, rhamnose, xylose, or a combinations of sugars, for example in an oligosacharide or scaffolded system.

[0028] Suitable carbohydrate moieties include monosaccharides, oligosaccharides and polysaccharides, and include any carbohydrate moiety that is present in naturally occurring glycoproteins or in biological systems. For example, optionally protected glycosyl or glycoside derivatives, for example optionally-protected glucosyl, glucoside, galactosyl or galactoside derivatives. Glycosyl and glycoside groups include both α and β groups. Suitable carbohydrate moieties include glucose, galactose, fucose, GlcNAc, GalNAc, sialic acid, and mannose, and oligosaccharides or polysaccharides comprising at least one glucose, galactose, fucose, GlcNAc, GalNAc, sialic acid, and/or mannose residue.

[0029] Any functional groups in the carbohydrate moiety may optionally be protected using protecting groups known in the art (see for example Greene et al, “Protecting groups in organic synthesis”, 2nd Edition, Wiley, New York, 1991, the disclosure of which is hereby incorporated by reference). Suitable protecting groups for any —OH groups in the carbohydrate moiety include acetate (Ac), benzyl (Bn), silyl (for example tert-butyl dimethylsilyl (TBDMSi) and tert-butyldiphenylsilyl (TMDPSi)), acetals, ketals, and methoxymethyl (MOM). Any protecting groups may be removed before or after attachment of the carbohydrate moiety to the peptide linker.

[0030] In a preferred embodiment of the invention said sugars are unprotected.

[0031] Particularly preferred carbohydrate moieties include Glc(Ac)₄β-, Glc(Bn)₄β-, Gal(Ac)₄β-, Gal(Bn)₄β-, Glc(Ac)₄α(1,4)Glc(Ac)₃α(1,4)Glc(Ac)₄β-, β-Glc, β-Gal, -Et-β-Gal,-Et-β-Glc, Et-α-Glc, -Et-α-Man, -Et-Lac, -β-Glc(Ac)₂, β-Glc(Ac)₃, -Et-α-Glc(Ac)₂, -Et-α-Glc(Ac)₃, -Et-α-Glc(Ac)₄, -Et-β-Glc(Ac)₂, -Et-β-Glc(Ac)₃, -Et-β-Glc(Ac)₄, -Et-α-Man(Ac)₃, -Et-α-Man(Ac)₄, -Et-β-Gal(Ac)₃, -Et-13-Gal(Ac)₄, -Et-Lac(Ac)₅, -Et-Lac(Ac)₆, -Et-Lac(Ac)₇, and their deprotected equivalents.

[0032] Preferably, any saccharide units making up the carbohydrate moiety which are derived from naturally occurring sugars will each be in the naturally occurring enantiomeric form, which may be either the D-form (e.g. D-glucose or D-galactose), or the L-form (e.g. L-rhamnose or L-fucose). Any anomeric linkages may be α- or β- linkages.

[0033] In an alternative preferred embodiment of the invention said polypeptide does not comprise a peptide linker molecule and is a direct fusion of interferon λ and the interferon λ binding domain of the interferon λ receptor.

[0034] In a preferred embodiment of the invention said fusion polypeptide comprises the amino acid sequence as represented in FIG. 1 (SEQ ID NO: 1), FIG. 2 (SEQ ID NO: 2) or FIG. 3 (SEQ ID NO: 3) wherein said polypeptide optionally includes a signal sequence.

[0035] In a preferred embodiment of the invention interferon λ is represented by FIG. 1 (SEQ ID NO: 1).

[0036] In a preferred embodiment of the invention said interferon λ amino acid sequence variant is a modification of amino acid residue cysteine 190 in FIG. 1 (SEQ ID NO: 1); preferably cysteine190 is modified by an amino acid substitution.

[0037] In a preferred embodiment of the invention said substitution is cysteine 190 for a serine amino acid.

[0038] In an alternative preferred embodiment of the invention said amino acid sequence variant is a modification of amino acid residue cysteine 34 in FIG. 1 (SEQ ID NO: 1); preferably cysteine 34 is modified by an amino acid substitution.

[0039] In a preferred embodiment of the invention said substitution is cysteine 34 for a serine amino acid.

[0040] In a preferred embodiment of the invention said interferon λ amino acid sequence variant is a modification of amino acid residue 190 and amino acid residue 34.

[0041] In a preferred embodiment of the invention interferon λ is represented by FIG. 2 (SEQ ID NO: 2).

[0042] In a preferred embodiment of the invention interferon λ is represented by FIG. 3 (SEQ ID NO: 3).

[0043] In a preferred embodiment of the invention said interferon λ amino acid sequence variant is a modification of amino acid residue cysteine 73 in FIG. 2 or 3 (SEQ ID NO: 2 or 3); preferably cysteine 73 is modified by an amino acid substitution.

[0044] In a preferred embodiment of the invention said substitution is cysteine 73 for a serine amino acid.

[0045] In a preferred embodiment of the invention said substitution is cysteine 73 for an alanine amino acid.

[0046] In a preferred embodiment of the invention said interferon λ amino acid sequence variant is a modification of amino acid residue cysteine 75 in FIG. 2 or 3 (SEQ ID NO: 2 or 3); preferably cysteine 75 is modified by an amino acid substitution.

[0047] In a preferred embodiment of the invention said substitution is cysteine 75 for a serine amino acid.

[0048] In a preferred embodiment of the invention the interferon binding domain of an interferon receptor is an interferon λ receptor binding domain comprising FIG. 4a, FIG. 4b or FIG. 4c (SEQ ID NO: 4, 5 or 6) wherein said polypeptide optionally includes a signal sequence.

[0049] In a preferred embodiment of the invention interferon λ is linked to an interferon λ binding domain of an interferon λ receptor wherein said interferon λ is positioned amino terminal to said binding domain in said fusion polypeptide.

[0050] In an alternative preferred embodiment of the invention interferon λ is linked to an interferon λ binding domain of an interferon λ receptor wherein said interferon is positioned carboxyl-terminal to said binding domain in said fusion polypeptide.

[0051] In a preferred embodiment of the invention said fusion polypeptide comprises an amino acid sequence as represented in FIG. 6a, 6b, 6c, 6d, 6e, 6f, 6h, 6i, 6j, 6k or 6l (SEQ ID NO: 10-21), wherein said polypeptide optionally includes a signal sequence.

[0052] In a preferred embodiment of the invention said fusion polypeptide comprises an amino acid sequence as represented in FIG. 7a, 7b, 7c, 7d, 7e, 7f, 7h, 7i, 7j, 7k or 7l (SEQ ID NO: 22-33), wherein said polypeptide optionally includes a signal sequence.

[0053] In a preferred embodiment of the invention said fusion polypeptide comprises an amino acid sequence as represented in FIG. 8a, 8b, 8c, 8d, 8e, 8f, 8h, 8i, 8j, 8k or 8l (SEQ ID NO: 34-45), wherein said polypeptide optionally includes a signal sequence.

[0054] In a preferred embodiment of the invention said fusion polypeptide comprises an amino acid sequence as represented in FIG. 9a, 9b, 9c, 9d, 9e, 9f, 9h, 9i, 9j, 9k or 9l (SEQ ID NO: 46-57), wherein said polypeptide optionally includes a signal sequence.

[0055] In a preferred embodiment of the invention said fusion polypeptide comprises an amino acid sequence as represented in FIG. 10a, 10b, 10c, 10d, 10e, 10f, 10h, 10i, 10j, 10k, 10l, 10m, 10n, 10o or 10p (SEQ ID NO: 58-73), wherein said polypeptide optionally includes a signal sequence.

[0056] In a preferred embodiment of the invention said fusion polypeptide comprises an amino acid sequence as represented in FIG. 11a, 11b, 11c, 11d, 11e, 11f, 11h, 11i, 11j, 11k, 11l, 11m, 11n, 11o or 11p (SEQ ID NO: 74-89), wherein said polypeptide optionally includes a signal sequence.

[0057] In a preferred embodiment of the invention said fusion polypeptide comprises an amino acid sequence as represented in FIG. 12a, 12b, 12c, 12d, 12e, 12f, 12h, 12i, 12j, 12k, 12l, 12m, 12n, 12o or 12p (SEQ ID NO: 90-105), wherein said polypeptide optionally includes a signal sequence.

[0058] In a preferred embodiment of the invention said fusion polypeptide comprises an amino acid sequence as represented in FIG. 13a, 13b, 13c, 13d, 13e, 13f, 13h, 13i, 13j, 13k, 13l, 13m, 13n, 13o or 13p (SEQ ID NO: 106-121), wherein said polypeptide optionally includes a signal sequence.

[0059] In a preferred embodiment of the invention said fusion polypeptide comprises an amino acid sequence as represented in FIG. 14a, 14b, 14c, 14d, 14e, 14f, 14h, 14i, 14j, 14k, 14l, 14m, 14n, 14o or 14p (SEQ ID NO: 122-137), wherein said polypeptide optionally includes a signal sequence.

[0060] In a preferred embodiment of the invention said fusion polypeptide comprises an amino acid sequence as represented in FIG. 15a, 15b, 15c, 15d, 15e, 15f, 15h, 15i, 15j, 15k, 15l, 15m, 15n, 15o or 15p (SEQ ID NO: 138-153), wherein said polypeptide optionally includes a signal sequence.

[0061] In a preferred embodiment of the invention said fusion polypeptide comprises an amino acid sequence as represented in FIG. 16a, 16b, 16c, 16d, 16e, 16f, 16h, 16i, 16j, 16k, 16l, 16m, 16n, 16o or 16p (SEQ ID NO: 154-169), wherein said polypeptide optionally includes a signal sequence.

[0062] In a preferred embodiment of the invention said fusion polypeptide comprises an amino acid sequence as represented in FIG. 17a, 17b, 17c, 17d, 17e, 17f, 17h, 17i, 17j, 17k, 17l, 17m, 17n, 17o or 17p (SEQ ID NO: 170-181), wherein said polypeptide optionally includes a signal sequence.

[0063] According to an aspect of the invention there is provided a homodimer consisting of two polypeptides wherein each of said polypeptides comprises:
[0064] i) a first part comprising interferon λ, or a receptor binding domain thereof, optionally linked by a peptide linking molecule to
[0065] ii) a second part comprising at least one interferon λ binding domain or part thereof, of an interferon λ receptor.

[0066] According to an aspect of the invention there is provided a nucleic acid molecule that encodes a polypeptide according to the invention.

[0067] According to a further aspect of the invention there is provided a vector comprising a nucleic acid molecule according to the invention.

[0068] In a preferred embodiment of the invention said vector is an expression vector adapted to express the nucleic acid molecule according to the invention.

[0069] A vector including nucleic acid (s) according to the invention need not include a promoter or other regulatory sequence, particularly if the vector is to be used to introduce the nucleic acid into cells for recombination into the genome for stable transfection. Preferably the nucleic acid in the vector is operably linked to an appropriate promoter or other regulatory elements for transcription in a host cell. The vector may be a bi-functional expression vector which functions in multiple hosts. By “promoter” is meant a nucleotide sequence upstream from the transcriptional initiation site and which contains all the regulatory regions required for transcription. Suitable promoters include constitutive, tissue-specific, inducible, developmental or other promoters for expression in eukaryotic or prokaryotic cells. “Operably linked” means joined as part of the same nucleic acid molecule, suitably positioned and oriented for transcription to be initiated from the promoter. DNA operably linked to a promoter is “under transcriptional initiation regulation” of the promoter.

[0070] In a preferred embodiment the promoter is a constitutive, an inducible or regulatable promoter.

[0071] According to a further aspect of the invention there is provided a cell transfected or transformed with a nucleic acid molecule or vector according to the invention.

[0072] Preferably said cell is a eukaryotic cell. Alternatively said cell is a prokaryotic cell.

[0073] In a preferred embodiment of the invention said cell is selected from the group consisting of; a fungal cell (e.g. Pichia spp, Saccharomyces spp, Neurospora spp); insect cell (e.g. Spodoptera spp); a mammalian cell (e.g. COS cell, CHO cell); a plant cell.

[0074] According to a further aspect of the invention there is provided a pharmaceutical composition comprising a polypeptide according to the invention including an excipient or carrier.

[0075] In a preferred embodiment of the invention said pharmaceutical composition is combined with a further therapeutic agent.

[0076] When administered the pharmaceutical composition of the present invention is administered in pharmaceutically acceptable preparations. Such preparations may routinely contain pharmaceutically acceptable concentrations of salt, buffering agents, preservatives, compatible carriers, and optionally other therapeutic agents.

[0077] The pharmaceutical compositions of the invention can be administered by any conventional route, including injection. The administration and application may, for example, be oral, intravenous, intraperitoneal, intramuscular, intracavity, intra-articuar, subcutaneous, topical (eyes), dermal (e.g a cream lipid soluble insert into skin or mucus membrane), transdermal, or intranasal.

[0078] Pharmaceutical compositions of the invention are administered in effective amounts. An “effective amount” is that amount of pharmaceuticals/compositions that alone, or together with further doses or synergistic drugs, produces the desired response. This may involve only slowing the progression of the disease temporarily, although more preferably, it involves halting the progression of the disease permanently. This can be monitored by routine methods or can be monitored according to diagnostic methods.

[0079] The doses of the pharmaceuticals compositions administered to a subject can be chosen in accordance with different parameters, in particular in accordance with the mode of administration used and the state of the subject (i.e. age, sex). When administered, the pharmaceutical compositions of the invention are applied in pharmaceutically-acceptable amounts and in pharmaceutically-acceptable compositions. When used in medicine salts should be pharmaceutically acceptable, but non-pharmaceutically acceptable salts may conveniently be used to prepare pharmaceutically-acceptable salts thereof and are not excluded from the scope of the invention. Such pharmacologically and pharmaceutically-acceptable salts include, but are not limited to, those prepared from the following acids: hydrochloric, hydrobromic, sulfuric, nitric, phosphoric, maleic, acetic, salicylic, citric, formic, malonic, succinic, and the like. Also, pharmaceutically-acceptable salts can be prepared as alkaline metal or alkaline earth salts, such as sodium, potassium or calcium salts.

[0080] The pharmaceutical compositions may be combined, if desired, with a pharmaceutically-acceptable carrier. The term “pharmaceutically-acceptable carrier” as used herein means one or more compatible solid or liquid fillers, diluents or encapsulating substances that are suitable for administration into a human. The term “carrier” denotes an organic or inorganic ingredient, natural or synthetic, with which the active ingredient is combined to facilitate the application. The components of the pharmaceutical compositions also are capable of being co-mingled with the molecules of the present invention, and with each other, in a manner such that there is no interaction that would substantially impair the desired pharmaceutical efficacy.

[0081] The pharmaceutical compositions may contain suitable buffering agents, including: acetic acid in a salt; citric acid in a salt; boric acid in a salt; and phosphoric acid in a salt.

[0082] The pharmaceutical compositions also may contain, optionally, suitable preservatives, such as: benzalkonium chloride; chlorobutanol; parabens and thimerosal.

[0083] The pharmaceutical compositions may conveniently be presented in unit dosage form and may be prepared by any of the methods well-known in the art of pharmacy. All methods include the step of bringing the active agent into association with a carrier that constitutes one or more accessory ingredients. In general, the compositions are prepared by uniformly and intimately bringing the active compound into association with a liquid carrier, a finely divided solid carrier, or both, and then, if necessary, shaping the product.

[0084] Compositions suitable for oral administration may be presented as discrete units, such as capsules, tablets, lozenges, each containing a predetermined amount of the active compound. Other compositions include suspensions in aqueous liquids or non-aqueous liquids such as syrup, elixir or an emulsion.

[0085] Compositions suitable for parenteral administration conveniently comprise a sterile aqueous or non-aqueous preparation that is preferably isotonic with the blood of the recipient. This preparation may be formulated according to known methods using suitable dispersing or wetting agents and suspending agents. The sterile injectable preparation also may be a sterile injectable solution or suspension in a non-toxic parenterally-acceptable diluent or solvent, for example, as a solution in 1,3-butane diol. Among the acceptable solvents that may be employed are water, Ringer's solution, and isotonic sodium chloride solution. In addition, sterile, fixed oils are conventionally employed as a solvent or suspending medium. For this purpose any bland fixed oil may be employed including synthetic mono-or di-glycerides. In addition, fatty acids such as oleic acid may be used in the preparation of injectables. Carrier formulation suitable for oral, subcutaneous, intravenous, intramuscular, etc. administrations can be found in Remington's Pharmaceutical Sciences, Mack Publishing Co., Easton, Pa.

[0086] According to a further aspect of the invention there is provided a method to treat a human subject suffering from a viral infection comprising administering an effective amount of a polypeptide according to the invention.

[0087] According to a further aspect of the invention there is provided a method to treat a human subject suffering from cancer comprising administering an effective amount of a polypeptide according to the invention.

[0088] As used herein, the term “cancer” refers to cells having the capacity for autonomous growth, i.e., an abnormal state or condition characterized by rapidly proliferating cell growth. The term is meant to include all types of cancerous growths or oncogenic processes, metastatic tissues or malignantly transformed cells, tissues, or organs, irrespective of histopathologic type or stage of invasiveness. The term “cancer” includes malignancies of the various organ systems, such as those affecting, for example, lung, breast, thyroid, lymphoid, gastrointestinal, and genito-urinary tract, as well as adenocarcinomas which include malignancies such as most colon cancers, renal-cell carcinoma, prostate cancer and/or testicular tumours, non-small cell carcinoma of the lung, cancer of the small intestine and cancer of the esophagus. The term “carcinoma” is art recognized and refers to malignancies of epithelial or endocrine tissues including respiratory system carcinomas, gastrointestinal system carcinomas, genitourinary system carcinomas, testicular carcinomas, breast carcinomas, prostatic carcinomas, endocrine system carcinomas, and melanomas. Exemplary carcinomas include those forming from tissue of the cervix, lung, prostate, breast, head and neck, colon and ovary. The term “carcinoma” also includes carcinosarcomas, e.g., which include malignant tumours composed of carcinomatous and sarcomatous tissues. An “adenocarcinoma” refers to a carcinoma derived from glandular tissue or in which the tumor cells form recognizable glandular structures. The term “sarcoma” is art recognized and refers to malignant tumours of mesenchymal derivation.

[0089] In a further preferred embodiment of the invention said polypeptide is administered at two day intervals; preferably said polypeptide is administered at weekly, 2 weekly or monthly intervals.

[0090] According to an aspect of the invention there is provided the use of a polypeptide according to the invention for the manufacture of a medicament for the treatment of viral infection.

[0091] According to an aspect of the invention there is provided the use of a polypeptide according to the invention for the manufacture of a medicament for the treatment of cancer.

[0092] Throughout the description and claims of this specification, the words “comprise” and “contain” and variations of the words, for example “comprising” and “comprises”, means “including but not limited to”, and is not intended to (and does not) exclude other moieties, additives, components, integers or steps.

[0093] Throughout the description and claims of this specification, the singular encompasses the plural unless the context otherwise requires. In particular, where the indefinite article is used, the specification is to be understood as contemplating plurality as well as singularity, unless the context requires otherwise.

[0094] Features, integers, characteristics, compounds, chemical moieties or groups described in conjunction with a particular aspect, embodiment or example of the invention are to be understood to be applicable to any other aspect, embodiment or example described herein unless incompatible therewith.

### BRIEF DESCRIPTION OF THE FIGURES

[0095] An embodiment of the invention will now be described by example only and with reference to the following figures:

[0096] FIG. 1(a) is the amino acid sequence of interferon λ 1 [IL29] (SEQ ID NO: 1); FIG. 1(b) is the amino acid sequence of interferon λ 1 [IL29] highlighting cysteine amino acid residues;

[0097] FIG. 2(a) is the amino acid sequence of interferon λ 2 [IL28A] (SEQ ID NO: 2); FIG. 2(b) is the amino acid sequence of interferon λ 2 [IL28A] highlighting cysteine amino acid residues;

[0098] FIG. 3(a) is the amino acid sequence of interferon λ 3 [IL28B] (SEQ ID NO: 3); FIG. 3(b) is the amino acid sequence of interferon λ 3 [IL28B] highlighting cysteine amino acid residues;

[0099] FIG. 4(a) Interferon lambda receptor 1 IFNLR1 (high affinity receptor) (SEQ ID NO: 4); FIG. 4(b) Interferon lambda receptor 1 IFNLR1 (high affinity receptor chain) ectodomain (SEQ ID NO: 5); FIG. 4(c) Interferon lambda receptor 1 IFNLR1 (high affinity receptor chain) ectodomain with mutations C86X&C150X (SEQ ID NO: 6);

[0100] FIG. 5(a) 1IL10R2 receptor (low affinity receptor chain) (SEQ ID NO: 7); FIG. 5(b) IL10R2 receptor (low affinity receptor chain) ectodomain (SEQ ID NO: 8); FIG. 5(c) IL10R2 receptor (low affinity receptor chain) ectodomain with C106X mutation (SEQ ID NO: 9);

[0101] FIGS. 6(a) to 6(l) are the amino acid sequences of IL29-(G4S)5-IFNLR1ect LR fusions (SEQ ID NO: 10-21);

[0102] FIGS. 7(a) to 7(l) are the amino acid sequences of IL29-(G4S)4-IL10R2ect LR fusions (SEQ ID NO: 22-33);

[0103] FIGS. 8(a) to 8(l) are the amino acid sequences of IFNLR1ect-(G4S)4-IL29 RL fusions (SEQ ID NO: 34-45);

[0104] FIGS. 9(a) to 9(l) are the amino acid sequences of IL10R2ect-(G4S)5-IL29 RL fusions (SEQ ID NO: 46-57);

[0105] FIGS. 10(a) to 10(p) are the amino acid sequences of IL28A-(G4S)5-IFNLR1ect LR fusions (SEQ ID NO: 58-73);

[0106] FIGS. 11(a) to 11(p) are the amino acid sequences of IL28A-(G4S)4-IL10R2ect LR fusions (SEQ ID NO: 74-89);

[0107] FIGS. 12(a) to 12(p) are the amino acid sequences of IFNLR1ect-(G4S)4-IL28A RL fusions (SEQ ID NO: 90-105);

[0108] FIGS. 13(a) to 13(p) are the amino acid sequences of IL10R2ect-(G4S)5-IL28A RL fusions (SEQ ID NO: 106-121);

[0109] FIGS. 14(a) to 14(p) are the amino acid sequences of IL28b-(G4S)5-IFNLR1ect LR fusions (SEQ ID NO: 122-137);

[0110] FIGS. 15(a) to 15(p) are the amino acid sequences of IL28b-(G4S)4-IL10R2ect LR fusions (SEQ ID NO: 138-153);

[0111] FIGS. 16(a) to 16(p) are the amino acid sequences of IFNLR1ect-(G4S)4-IL28b RL fusions (SEQ ID NO: 154-169);

[0112] FIGS. 17(a) to 17(p) are the amino acid sequences of IL10R2ect-(G4S)5-IL28b RL fusions (SEQ ID NO: 170-185);

[0113] FIG. 18a is the amino acid sequence of IL28B (C73A)-(G4S)5-IFNLR1 LR fusion (SEQ ID NO: 186); FIG. 18b is the amino acid sequence of IL28B (C73A)-(G4S)4-IL10R2ect LR fusion (SEQ ID NO: 187); and

[0114] FIGS. 19A and B show the transient and stable expression of fusion proteins 13E1 and 13F1 (SEQ ID NO: 186 and 187), respectively.

### DETAILED DESCRIPTION

### Materials and Methods

### Interferon Bioassay

[0115] Commercially available bioassays (see, SBH Sciences Inc., Nattick, Mass. and Biocpmare Inc.) can be used to test interferon. In addition, methods that assay the activity of interferon are described in Lleonart et al. (Nature Biotech (1990) 8: 1263-1267); Sedmk and Grossberg (J. Gen. Virology (1973) 21: 1-7); and Baumgarth and Kelso (J. Virology (1996) 70(7): p 4411-4418).

### Immunological Testing

[0116] Immunoassays that measure the binding of ligand or receptor to polyclonal and monoclonal antibodies are known in the art. Commercially available antibodies are available to detect the ligand or receptor in samples and also for use in competitive inhibition studies (for example, Abcam PLC., Cambridge, UK)

### Recombinant Production of Fusion Proteins

[0117] The components of the fusion proteins were generated by PCR using primers designed to anneal to the ligand or receptor and to introduce suitable restriction sites for cloning into the target vector (FIG. 16a). The template for the PCR comprised the target gene and was obtained from IMAGE clones, cDNA libraries or from custom synthesised genes. Once the ligand and receptor genes with the appropriate flanking restriction sites had been synthesised, these were then ligated either side of the linker region in the target vector (FIG. 16b). The construct was then modified to contain the correct linker without flanking restriction sites by the insertion of a custom synthesised length of DNA between two unique restriction sites either side of the linker region, by mutation of the linker region by ssDNA modification techniques, by insertion of a primer duplex/multiplex between suitable restriction sites or by PCR modification (FIG. 16c).

[0118] Alternatively, the linker with flanking sequence, designed to anneal to the ligand or receptor domains of choice, was initially synthesised by creating an oligonucleotide duplex and this processed to generate double-stranded DNA (FIG. 17a). PCRs were then performed using the linker sequence as a “megaprimer”, primers designed against the opposite ends of the ligand and receptor to which the “megaprimer” anneals to and with the ligand and receptor as the templates. The terminal primers were designed with suitable restriction sites for ligation into the expression vector of choice (FIG. 17b).

### Expression and Purification of Fusion Proteins

[0119] Expression was carried out in a suitable system (e.g. mammalian CHO cells, E. coli) and this was dependant on the vector into which the LR-fusion gene was generated. Expression was then analysed using a variety of methods which could include one or more of SDS-PAGE, Native PAGE, western blotting, ELISA.

[0120] Once a suitable level of expression was achieved the RL-fusions were expressed at a larger scale to produce enough protein for purification and subsequent analysis.

[0121] Purification was carried out using a suitable combination of one or more chromatographic procedures such as ion exchange chromatography, hydrophobic interaction chromatography, ammonium sulphate precipitation, gel filtration, size exclusion and/or affinity chromatography (using nickel/cobalt-resin, antibody-immobilised resin and/or ligand/receptor-immobilised resin).

[0122] Purified protein was analysed using a variety of methods which could include one or more of Bradford's assay, SDS-PAGE, Native PAGE, western blotting, ELISA.

### Characterisation of LR-Fusions

[0123] Denaturing PAGE, native PAGE gels and western blotting were used to analyse the fusion polypeptides and western blotting performed with antibodies non-conformationally sensitive to the LR-fusion. Native solution state molecular weight information can be obtained from techniques such as size exclusion chromatography using a Superose G200 analytical column and analytical ultracentrifugation.

Construction of Chimeric clones

[0124] All clones were ligated using the restriction enzymes Nhe1/HindIII, into the mammalian expression plasmid pSecTag-link. Clones were attached to the secretion signal for human interferon for efficient secretion into cell media. The whole gene for a7B1 [FIG. 18a; SEQ ID NO: 186)] was cloned using gene synthesis and cloned into the mammalian expression vector pSecTag-link to form pIFNsecTag-a7B1.

Mammalian Expression of IFN Chimeric clones

[0125] A mammalian expression system has been established using a modification of the Invitrogen vector pSecTag-V5/FRT-Hist.

### Invitrogen's Flp-In System

[0126] This system allows for the rapid generation of stable clones into specific sites within the host genome for high expression. This can be used with either secreted or cytoplasmic expressed proteins. Flp-In host cell lines (flp-In CHO) have a single Flp recombinase target (FRT) site located at a transcriptionally active genomic locus

[0127] Stable cell lines are generated by co-transfection of vector (Containing FRT target site) and pOG44 (a plasmid that transiently expresses flp recombinase) into Flp-In cell line. Selection is with Hygromycin B. There is no need for clonal selection since integration of DNA is directed.

[0128] Culturing Flp-In Cell lines: followed manufactures instruction using basic cell culture techniques.

### Stable Transfection of CHO Flp-In Cells Using Fugene-6

[0129] The day before transfection, CHO Flp-In cells were seeded at 6×10E5 per 100 mm petri dish in a total volume of 10 ml of Hams F12 media containing 10% (v/v) Fetal Calf Serum, 1% Penicillin/streptomycin and 4 mM L-glutamine. The next day added 570 μl of serum free media (containing no antibiotics) to a 1.5 ml polypropylene tube. 30 μl of fugene-6 was then added and mixed by gentle rolling. A separate mix of plasmids was set up for each transfection which combined 2 μg plasmid of interest with 18 μg pOG44 (plasmid contains recombinase enzyme necessary for correct integration of plasmid into host genome). Control plate received no plasmid. This was mixed with fugene-6 by gentle rolling, left @ RmT for 15 minutes, then applied drop-wise to the surface of the each petri dish containing CHO Flp-In cells in F12 media+10% FCS. The plates were gently rolled to ensure good mixing and left for 24 hrs @ 37° C./5% CO2. The next day media was exchanged for selective media containing hygromycin B @ 600 ug/ml. Cells were routinely kept at 60% confluency or less. Cells were left to grow in the presence of 600 ug/ml hygromycin B until control plate cells (non transfected cells) had died (i.e. no hygromycin resistance).

### SDS-PAGE Analysis

[0130] Testing Expression from Stable CHO Cell Lines

[0131] Confluent CHO Flp-In cell lines expressing the protein of interest were grown in 75 cm2 flasks for approximately 3-4 days in serum free media, at which point samples were taken and concentrated using acetone precipitation. Samples were mixed with an equal volume of laemmli loading buffer in the presence or absence of 25 mM DTT and boiled for 5 minutes. Samples were analysed by SDS-PAGE and transferred to a PVDF membrane. After blocking in 5% (w/v) Milk protein in PBS-0.05% (v/v) Tween 20, sample detection was carried out using a specific anti-IGF-1 antibody together with a Horse Radish Peroxidase (HRP) conjugated secondary antibody. Visualisation was by chemiluminesence on photographic film using an HRP detection kit.

Testing Expression from Transient Tansfections of CHO FlpIn

[0132] CHO Flp-In cells were seeded at 0.25×10E6 cells per well of a 6 well plate in a total volume of 2 ml media (DMEM, F12, 10% FCS+P/S+L-glutamine+Zeocin). Cells were left to grow o/n. Cells were then transfected using either TranslT-CHO Reagent (Mirus) or fugene-6 at the specified reagent ratios stated in table 1. Control transfections were set up using 1B7stop (GH containing chimeric molecule). Briefly, if using TransIT reagent, 200 ul of Serum free media (OPTI MEM) was added to a 1.5 ml eppendorff per transfection followed by 2 ug DNA. The tubes were left for 15 minutes at RmT. 1 ul of CHO Mojo Reagent was then added, mixed and left for a further 15 minutes. Media was changed to serum free and the transfection mix pippetted dropwise onto the surface of the appropriate well. Briefly, if using Fugene-6 reagent, 94 ul of Serum free media (OPTI MEM) was added to a 1.5 ml seppendorff per transfection followed by 2 ug DNA. The tubes were left for 15 minutes at RmT. Transfection mix was then pippetted drop wise onto the surface of the appropriate well containing serum free media. All plate were left @ 37° C./5% CO₂ for 2-3 days

### Statistics

[0133] Two groups were compared with a Student's test if their variance was normally distributed or by a Student-Satterthwaite's test if not normally distributed. Distribution was tested with an F test. One-way ANOVA was used to compare the means of 3 or more groups and if the level of significance was p<0.05 individual comparisons were performed with Dunnett's tests. All statistical tests were two-sided at the 5% level of significance and no imputation was made for missing values.

### EXAMPLE 1

[0134] All clones were ligated using the restriction enzymes NheI/HindIII, into the mammalian expression plasmid pSecTag-link. Clones were attached to the secretion signal for human IFNI3 for efficient secretion into cell media. The whole genes for 13E1 and 13F1 were cloned using gene synthesis and cloned into the mammalian expression vector pSecTag-link to form pIFNI3SecTag 13E1 and pIFNI3SecTag13F1.

### EXAMPLE 2

[0135] A mammalian expression system has been established using a modified Invitrogen vector pSecTag-V5/FRT-Hist. This vector is used in Invitrogen's FIp-In system to direct integration of the target gene into the host cell line, allowing rapid generation of stable clones into specific sites within the host genome for high expression. Culturing FIp-In Cell lines: followed manufacturer's instruction using basic cell culture techniques.

[0136] Stable cell lines were generated in 6-well plates using Fugene-6 as the transfection reagent. The CHO FIp-In cells were co-transfected with the expression vector and pOG44, a plasmid that expresses flp recombinase, an enzyme which causes the recombination of the LR-fusion gene into a “hot-spot” of the cell chromosome. Hygromycin B was used to select for cells with positive recombinants.

[0137] Once the stable cell lines had been established they were grown on 75 cm² culture plates, at a confluency of 50-70% the media was changed to serum free media. The cultures were incubated for a further 2-4 days after which media samples were taken. These were run on 13% SDS-PAGE gels and transferred to PVDF membrane for immuno-blotting. After blocking in 5% (w/v) milk protein in PBS+0.05% (v/v) Tween 20, sample detection was carried out using a specific anti-IL28B antibody together with a Horse Radish Peroxidase (HRP) conjugated secondary antibody. Visualisation was by chemiluminesence on photographic film using an HRP detection kit. The transient and stable expression of fusion protein 13E1 and 13F1 as represented by the amino acid sequence shown in FIGS. 18a and 18b (SEQ ID NO: 186 and 187) are illustrated in FIG. 19a and FIG. 19b respectively.

The application's sequence listing, which the Patent Office published only in electronic form, follows.

SEQUENCE LISTING (207 sequences)

SEQ ID NO: 1 - protein, 200 aa, Homo sapiens
MAAAWTVVLVTLVLGLAVAGPVPTSKPTTTGKGCHIGRFKSLSPQELASFKKARDALEESLKLKNWSCSSPVFPGNWDLRLLQVRERPVALEAELALTLKVLEAAAGPALEDVLDQPLHTLHHILSQLQACIQPQPTAGPRPRGRLHHWLHRLQEAPKKESAGCLEASVTFNLFRLLTRDLKYVADGNLCLRTSTHPEST

SEQ ID NO: 2 - protein, 200 aa, Homo sapiens
MKLDMTGDCTPVLVLMAAVLTVTGAVPVARLHGALPDARGCHIAQFKSLSPQELQAFKRAKDALEESLLLKDCRCHSRLFPRTWDLRQLQVRERPMALEAELALTLKVLEATADTDPALVDVLDQPLHTLHHILSQFRACIQPQPTAGPRTRGRLHHWLYRLQEAPKKESPGCLEASVTFNLFRLLTRDLNCVASGDLCV

SEQ ID NO: 3 - protein, 200 aa, Homo sapiens
MKLDMTGDCMPVLVLMAAVLTVTGAVPVARLRGALPDARGCHIAQFKSLSPQELQAFKRAKDALEESLLLKDCKCRSRLFPRTWDLRQLQVRERPVALEAELALTLKVLEATADTDPALGDVLDQPLHTLHHILSQLRACIQPQPTAGPRTRGRLHHWLHRLQEAPKKESPGCLEASVTFNLFRLLTRDLNCVASGDLCV

SEQ ID NO: 4 - protein, 520 aa, Homo sapiens
MAGPERWGPLLLCLLQAAPGRPRLAPPQNVTLLSQNFSVYLTWLPGLGNPQDVTYFVAYQSSPTRRRWREVEECAGTKELLCSMMCLKKQDLYNKFKGRVRTVSPSSKSPWVESEYLDYLFEVEPAPPVLVLTQTEEILSANATYQLPPCMPPLDLKYEVAFWKEGAGNKTLFPVTPHGQPVQITLQPAASEHHCLSARTIYTFSVPKYSKFSKPTCFLLEVPEANWAFLVLPSLLILLLVIAAGGVIWKTLMGNPWFQRAKMPRALDFSGHTHPVATFQPSRPESVNDLFLCPQKELTRGVRPTPRVRAPATQQTRWKKDLAEDEEEEDEEDTEDGVSFQPYIEPPSFLGQEHQAPGHSEAGGVDSGRPRAPLVPSEGSSAWDSSDRSWASTVDSSWDRAGSSGYLAEKGPGQGPGGDGHQESLPPPEFSKDSGFLEELPEDNLSSWATWGTLPPEPNLVPGGPPVSLQTLTFCWESSPEEEEEARESEIEDSDAGSWGAESTQRTEDRGRTLGHYMAR

SEQ ID NO: 5 - protein, 228 aa, Homo sapiens
MAGPERWGPLLLCLLQAAPGRPRLAPPQNVTLLSQNFSVYLTWLPGLGNPQDVTYFVAYQSSPTRRRWREVEECAGTKELLCSMMCLKKQDLYNKFKGRVRTVSPSSKSPWVESEYLDYLFEVEPAPPVLVLTQTEEILSANATYQLPPCMPPLDLKYEVAFWKEGAGNKTLFPVTPHGQPVQITLQPAASEHHCLSARTIYTFSVPKYSKFSKPTCFLLEVPEANWA

SEQ ID NO: 6 - protein, 228 aa, Homo sapiens
  misc_feature (86)..(86): Xaa can be any naturally occurring amino acid
  misc_feature (150)..(150): Xaa can be any naturally occurring amino acid
MAGPERWGPLLLCLLQAAPGRPRLAPPQNVTLLSQNFSVYLTWLPGLGNPQDVTYFVAYQSSPTRRRWREVEECAGTKELLCSMMXLKKQDLYNKFKGRVRTVSPSSKSPWVESEYLDYLFEVEPAPPVLVLTQTEEILSANATYQLPPXMPPLDLKYEVAFWKEGAGNKTLFPVTPHGQPVQITLQPAASEHHCLSARTIYTFSVPKYSKFSKPTCFLLEVPEANWA

SEQ ID NO: 7 - protein, 325 aa, Homo sapiens
MAWSLGSWLGGCLLVSALGMVPPPENVRMNSVNFKNILQWESPAFAKGNLTFTAQYLSYRIFQDKCMNTTLTECDFSSLSKYGDHTLRVRAEFADEHSDWVNITFCPVDDTIIGPPGMQVEVLADSLHMRFLAPKIENEYETWTMKNVYNSWTYNVQYWKNGTDEKFQITPQYDFEVLRNLEPWTTYCVQVRGFLPDRNKAGEWSEPVCEQTTHDETVPSWMVAVILMASVFMVCLALLGCFALLWCVYKKTKYAFSPRNSLPQHLKEFLGHPHHNTLLFFSFPLSDENDVFDKLSVIAEDSESGKQNPGDSCSLGTPPGQGPQS

SEQ ID NO: 8 - protein, 220 aa, Homo sapiens
MAWSLGSWLGGCLLVSALGMVPPPENVRMNSVNFKNILQWESPAFAKGNLTFTAQYLSYRIFQDKCMNTTLTECDFSSLSKYGDHTLRVRAEFADEHSDWVNITFCPVDDTIIGPPGMQVEVLADSLHMRFLAPKIENEYETWTMKNVYNSWTYNVQYWKNGTDEKFQITPQYDFEVLRNLEPWTTYCVQVRGFLPDRNKAGEWSEPVCEQTTHDETVPS

SEQ ID NO: 9 - protein, 220 aa, Homo sapiens
  misc_feature (106)..(106): Xaa can be any naturally occurring amino acid
MAWSLGSWLGGCLLVSALGMVPPPENVRMNSVNFKNILQWESPAFAKGNLTFTAQYLSYRIFQDKCMNTTLTECDFSSLSKYGDHTLRVRAEFADEHSDWVNITFXPVDDTIIGPPGMQVEVLADSLHMRFLAPKIENEYETWTMKNVYNSWTYNVQYWKNGTDEKFQITPQYDFEVLRNLEPWTTYCVQVRGFLPDRNKAGEWSEPVCEQTTHDETVPS

SEQ ID NO: 10 - protein, 433 aa, Artificial
  interferon lambda fusion protein
MAAAWTVVLVTLVLGLAVAGPVPTSKPTTTGKGCHIGRFKSLSPQELASFKKARDALEESLKLKNWSCSSPVFPGNWDLRLLQVRERPVALEAELALTLKVLEAAAGPALEDVLDQPLHTLHHILSQLQACIQPQPTAGPRPRGRLHHWLHRLQEAPKKESAGCLEASVTFNLFRLLTRDLKYVADGNLCLRTSTHPESTGGGGSGGGGSGGGGSGGGGSGGGGSRPRLAPPQNVTLLSQNFSVYLTWLPGLGNPQDVTYFVAYQSSPTRRRWREVEECAGTKELLCSMMCLKKQDLYNKFKGRVRTVSPSSKSPWVESEYLDYLFEVEPAPPVLVLTQTEEILSANATYQLPPCMPPLDLKYEVAFWKEGAGNKTLFPVTPHGQPVQITLQPAASEHHCLSARTIYTFSVPKYSKFSKPTCFLLEVPEANWA

SEQ ID NO: 11 - protein, 433 aa, Artificial
  interferon lambda fusion protein
  misc_feature (34)..(34): Xaa can be any naturally occurring amino acid
MAAAWTVVLVTLVLGLAVAGPVPTSKPTTTGKGXHIGRFKSLSPQELASFKKARDALEESLKLKNWSCSSPVFPGNWDLRLLQVRERPVALEAELALTLKVLEAAAGPALEDVLDQPLHTLHHILSQLQACIQPQPTAGPRPRGRLHHWLHRLQEAPKKESAGCLEASVTFNLFRLLTRDLKYVADGNLCLRTSTHPESTGGGGSGGGGSGGGGSGGGGSGGGGSRPRLAPPQNVTLLSQNFSVYLTWLPGLGNPQDVTYFVAYQSSPTRRRWREVEECAGTKELLCSMMCLKKQDLYNKFKGRVRTVSPSSKSPWVESEYLDYLFEVEPAPPVLVLTQTEEILSANATYQLPPCMPPLDLKYEVAFWKEGAGNKTLFPVTPHGQPVQITLQPAASEHHCLSARTIYTFSVPKYSKFSKPTCFLLEVPEANWA

SEQ ID NO: 12 - protein, 433 aa, Artificial
  interferon lambda fusion protein
  misc_feature (68)..(68): Xaa can be any naturally occurring amino acid
MAAAWTVVLVTLVLGLAVAGPVPTSKPTTTGKGCHIGRFKSLSPQELASFKKARDALEESLKLKNWSXSSPVFPGNWDLRLLQVRERPVALEAELALTLKVLEAAAGPALEDVLDQPLHTLHHILSQLQACIQPQPTAGPRPRGRLHHWLHRLQEAPKKESAGCLEASVTFNLFRLLTRDLKYVADGNLCLRTSTHPESTGGGGSGGGGSGGGGSGGGGSGGGGSRPRLAPPQNVTLLSQNFSVYLTWLPGLGNPQDVTYFVAYQSSPTRRRWREVEECAGTKELLCSMMCLKKQDLYNKFKGRVRTVSPSSKSPWVESEYLDYLFEVEPAPPVLVLTQTEEILSANATYQLPPCMPPLDLKYEVAFWKEGAGNKTLFPVTPHGQPVQITLQPAASEHHCLSARTIYTFSVPKYSKFSKPTCFLLEVPEANWA

SEQ ID NO: 13 - protein, 433 aa, Artificial
  interferon lambda fusion protein
  misc_feature (131)..(131): Xaa can be any naturally occurring amino acid
MAAAWTVVLVTLVLGLAVAGPVPTSKPTTTGKGCHIGRFKSLSPQELASFKKARDALEESLKLKNWSCSSPVFPGNWDLRLLQVRERPVALEAELALTLKVLEAAAGPALEDVLDQPLHTLHHILSQLQAXIQPQPTAGPRPRGRLHHWLHRLQEAPKKESAGCLEASVTFNLFRLLTRDLKYVADGNLCLRTSTHPESTGGGGSGGGGSGGGGSGGGGSGGGGSRPRLAPPQNVTLLSQNFSVYLTWLPGLGNPQDVTYFVAYQSSPTRRRWREVEECAGTKELLCSMMCLKKQDLYNKFKGRVRTVSPSSKSPWVESEYLDYLFEVEPAPPVLVLTQTEEILSANATYQLPPCMPPLDLKYEVAFWKEGAGNKTLFPVTPHGQPVQITLQPAASEHHCLSARTIYTFSVPKYSKFSKPTCFLLEVPEANWA

SEQ ID NO: 14 - protein, 433 aa, Artificial
  interferon lambda fusion protein
  misc_feature (164)..(164): Xaa can be any naturally occurring amino acid
MAAAWTVVLVTLVLGLAVAGPVPTSKPTTTGKGCHIGRFKSLSPQELASFKKARDALEESLKLKNWSCSSPVFPGNWDLRLLQVRERPVALEAELALTLKVLEAAAGPALEDVLDQPLHTLHHILSQLQACIQPQPTAGPRPRGRLHHWLHRLQEAPKKESAGXLEASVTFNLFRLLTRDLKYVADGNLCLRTSTHPESTGGGGSGGGGSGGGGSGGGGSGGGGSRPRLAPPQNVTLLSQNFSVYLTWLPGLGNPQDVTYFVAYQSSPTRRRWREVEECAGTKELLCSMMCLKKQDLYNKFKGRVRTVSPSSKSPWVESEYLDYLFEVEPAPPVLVLTQTEEILSANATYQLPPCMPPLDLKYEVAFWKEGAGNKTLFPVTPHGQPVQITLQPAASEHHCLSARTIYTFSVPKYSKFSKPTCFLLEVPEANWA

SEQ ID NO: 15 - protein, 433 aa, Artificial
  interferon lambda fusion protein
  misc_feature (190)..(190): Xaa can be any naturally occurring amino acid
MAAAWTVVLVTLVLGLAVAGPVPTSKPTTTGKGCHIGRFKSLSPQELASFKKARDALEESLKLKNWSCSSPVFPGNWDLRLLQVRERPVALEAELALTLKVLEAAAGPALEDVLDQPLHTLHHILSQLQACIQPQPTAGPRPRGRLHHWLHRLQEAPKKESAGCLEASVTFNLFRLLTRDLKYVADGNLXLRTSTHPESTGGGGSGGGGSGGGGSGGGGSGGGGSRPRLAPPQNVTLLSQNFSVYLTWLPGLGNPQDVTYFVAYQSSPTRRRWREVEECAGTKELLCSMMCLKKQDLYNKFKGRVRTVSPSSKSPWVESEYLDYLFEVEPAPPVLVLTQTEEILSANATYQLPPCMPPLDLKYEVAFWKEGAGNKTLFPVTPHGQPVQITLQPAASEHHCLSARTIYTFSVPKYSKFSKPTCFLLEVPEANWA

SEQ ID NO: 16 - protein, 433 aa, Artificial
  interferon lambda fusion protein
  misc_feature (291)..(291): Xaa can be any naturally occurring amino acid
  misc_feature (355)..(355): Xaa can be any naturally occurring amino acid
MAAAWTVVLVTLVLGLAVAGPVPTSKPTTTGKGCHIGRFKSLSPQELASFKKARDALEESLKLKNWSCSSPVFPGNWDLRLLQVRERPVALEAELALTLKVLEAAAGPALEDVLDQPLHTLHHILSQLQACIQPQPTAGPRPRGRLHHWLHRLQEAPKKESAGCLEASVTFNLFRLLTRDLKYVADGNLCLRTSTHPESTGGGGSGGGGSGGGGSGGGGSGGGGSRPRLAPPQNVTLLSQNFSVYLTWLPGLGNPQDVTYFVAYQSSPTRRRWREVEECAGTKELLCSMMXLKKQDLYNKFKGRVRTVSPSSKSPWVESEYLDYLFEVEPAPPVLVLTQTEEILSANATYQLPPXMPPLDLKYEVAFWKEGAGNKTLFPVTPHGQPVQITLQPAASEHHCLSARTIYTFSVPKYSKFSKPTCFLLEVPEANWA

SEQ ID NO: 17 - protein, 433 aa, Artificial
  interferon lambda fusion protein
  misc_feature (34)..(34): Xaa can be any naturally occurring amino acid
  misc_feature (291)..(291): Xaa can be any naturally occurring amino acid
  misc_feature (355)..(355): Xaa can be any naturally occurring amino acid
MAAAWTVVLVTLVLGLAVAGPVPTSKPTTTGKGXHIGRFKSLSPQELASFKKARDALEESLKLKNWSCSSPVFPGNWDLRLLQVRERPVALEAELALTLKVLEAAAGPALEDVLDQPLHTLHHILSQLQACIQPQPTAGPRPRGRLHHWLHRLQEAPKKESAGCLEASVTFNLFRLLTRDLKYVADGNLCLRTSTHPESTGGGGSGGGGSGGGGSGGGGSGGGGSRPRLAPPQNVTLLSQNFSVYLTWLPGLGNPQDVTYFVAYQSSPTRRRWREVEECAGTKELLCSMMXLKKQDLYNKFKGRVRTVSPSSKSPWVESEYLDYLFEVEPAPPVLVLTQTEEILSANATYQLPPXMPPLDLKYEVAFWKEGAGNKTLFPVTPHGQPVQITLQPAASEHHCLSARTIYTFSVPKYSKFSKPTCFLLEVPEANWA

SEQ ID NO: 18 - protein, 433 aa, Artificial
  interferon lambda fusion protein
  misc_feature (68)..(68): Xaa can be any naturally occurring amino acid
  misc_feature (291)..(291): Xaa can be any naturally occurring amino acid
  misc_feature (355)..(355): Xaa can be any naturally occurring amino acid
MAAAWTVVLVTLVLGLAVAGPVPTSKPTTTGKGCHIGRFKSLSPQELASFKKARDALEESLKLKNWSXSSPVFPGNWDLRLLQVRERPVALEAELALTLKVLEAAAGPALEDVLDQPLHTLHHILSQLQACIQPQPTAGPRPRGRLHHWLHRLQEAPKKESAGCLEASVTFNLFRLLTRDLKYVADGNLCLRTSTHPESTGGGGSGGGGSGGGGSGGGGSGGGGSRPRLAPPQNVTLLSQNFSVYLTWLPGLGNPQDVTYFVAYQSSPTRRRWREVEECAGTKELLCSMMXLKKQDLYNKFKGRVRTVSPSSKSPWVESEYLDYLFEVEPAPPVLVLTQTEEILSANATYQLPPXMPPLDLKYEVAFWKEGAGNKTLFPVTPHGQPVQITLQPAASEHHCLSARTIYTFSVPKYSKFSKPTCFLLEVPEANWA

SEQ ID NO: 19 - protein, 433 aa, Artificial; identical to SEQ ID NO: 13
  interferon lambda fusion protein
  misc_feature (131)..(131): Xaa can be any naturally occurring amino acid

SEQ ID NO: 20 - protein, 433 aa, Artificial
  interferon lambda fusion protein
  misc_feature (164)..(164): Xaa can be any naturally occurring amino acid
  misc_feature (291)..(291): Xaa can be any naturally occurring amino acid
  misc_feature (355)..(355): Xaa can be any naturally occurring amino acid
MAAAWTVVLVTLVLGLAVAGPVPTSKPTTTGKGCHIGRFKSLSPQELASFKKARDALEESLKLKNWSCSSPVFPGNWDLRLLQVRERPVALEAELALTLKVLEAAAGPALEDVLDQPLHTLHHILSQLQACIQPQPTAGPRPRGRLHHWLHRLQEAPKKESAGXLEASVTFNLFRLLTRDLKYVADGNLCLRTSTHPESTGGGGSGGGGSGGGGSGGGGSGGGGSRPRLAPPQNVTLLSQNFSVYLTWLPGLGNPQDVTYFVAYQSSPTRRRWREVEECAGTKELLCSMMXLKKQDLYNKFKGRVRTVSPSSKSPWVESEYLDYLFEVEPAPPVLVLTQTEEILSANATYQLPPXMPPLDLKYEVAFWKEGAGNKTLFPVTPHGQPVQITLQPAASEHHCLSARTIYTFSVPKYSKFSKPTCFLLEVPEANWA

SEQ ID NO: 21 - protein, 433 aa, Artificial
  interferon lambda fusion protein
  misc_feature (190)..(190): Xaa can be any naturally occurring amino acid
  misc_feature (291)..(291): Xaa can be any naturally occurring amino acid
  misc_feature (355)..(355): Xaa can be any naturally occurring amino acid
MAAAWTVVLVTLVLGLAVAGPVPTSKPTTTGKGCHIGRFKSLSPQELASFKKARDALEESLKLKNWSCSSPVFPGNWDLRLLQVRERPVALEAELALTLKVLEAAAGPALEDVLDQPLHTLHHILSQLQACIQPQPTAGPRPRGRLHHWLHRLQEAPKKESAGCLEASVTFNLFRLLTRDLKYVADGNLXLRTSTHPESTGGGGSGGGGSGGGGSGGGGSGGGGSRPRLAPPQNVTLLSQNFSVYLTWLPGLGNPQDVTYFVAYQSSPTRRRWREVEECAGTKELLCSMMXLKKQDLYNKFKGRVRTVSPSSKSPWVESEYLDYLFEVEPAPPVLVLTQTEEILSANATYQLPPXMPPLDLKYEVAFWKEGAGNKTLFPVTPHGQPVQITLQPAASEHHCLSARTIYTFSVPKYSKFSKPTCFLLEVPEANWA

SEQ ID NO: 22 - protein, 421 aa, Artificial
  interferon lambda fusion protein
MAAAWTVVLVTLVLGLAVAGPVPTSKPTTTGKGCHIGRFKSLSPQELASFKKARDALEESLKLKNWSCSSPVFPGNWDLRLLQVRERPVALEAELALTLKVLEAAAGPALEDVLDQPLHTLHHILSQLQACIQPQPTAGPRPRGRLHHWLHRLQEAPKKESAGCLEASVTFNLFRLLTRDLKYVADGNLCLRTSTHPESTGGGGSGGGGSGGGGSGGGGSMVPPPENVRMNSVNFKNILQWESPAFAKGNLTFTAQYLSYRIFQDKCMNTTLTECDFSSLSKYGDHTLRVRAEFADEHSDWVNITFCPVDDTIIGPPGMQVEVLADSLHMRFLAPKIENEYETWTMKNVYNSWTYNVQYWKNGTDEKFQITPQYDFEVLRNLEPWTTYCVQVRGFLPDRNKAGEWSEPVCEQTTHDETVPS

SEQ ID NO: 23 - protein, 421 aa, Artificial
  interferon lambda fusion protein
  misc_feature (34)..(34): Xaa can be any naturally occurring amino acid
MAAAWTVVLVTLVLGLAVAGPVPTSKPTTTGKGXHIGRFKSLSPQELASFKKARDALEESLKLKNWSCSSPVFPGNWDLRLLQVRERPVALEAELALTLKVLEAAAGPALEDVLDQPLHTLHHILSQLQACIQPQPTAGPRPRGRLHHWLHRLQEAPKKESAGCLEASVTFNLFRLLTRDLKYVADGNLCLRTSTHPESTGGGGSGGGGSGGGGSGGGGSMVPPPENVRMNSVNFKNILQWESPAFAKGNLTFTAQYLSYRIFQDKCMNTTLTECDFSSLSKYGDHTLRVRAEFADEHSDWVNITFCPVDDTIIGPPGMQVEVLADSLHMRFLAPKIENEYETWTMKNVYNSWTYNVQYWKNGTDEKFQITPQYDFEVLRNLEPWTTYCVQVRGFLPDRNKAGEWSEPVCEQTTHDETVPS

SEQ ID NO: 24 - protein, 421 aa, Artificial
  interferon lambda fusion protein
  misc_feature (68)..(68): Xaa can be any naturally occurring amino acid
MAAAWTVVLVTLVLGLAVAGPVPTSKPTTTGKGCHIGRFKSLSPQELASFKKARDALEESLKLKNWSXSSPVFPGNWDLRLLQVRERPVALEAELALTLKVLEAAAGPALEDVLDQPLHTLHHILSQLQACIQPQPTAGPRPRGRLHHWLHRLQEAPKKESAGCLEASVTFNLFRLLTRDLKYVADGNLCLRTSTHPESTGGGGSGGGGSGGGGSGGGGSMVPPPENVRMNSVNFKNILQWESPAFAKGNLTFTAQYLSYRIFQDKCMNTTLTECDFSSLSKYGDHTLRVRAEFADEHSDWVNITFCPVDDTIIGPPGMQVEVLADSLHMRFLAPKIENEYETWTMKNVYNSWTYNVQYWKNGTDEKFQITPQYDFEVLRNLEPWTTYCVQVRGFLPDRNKAGEWSEPVCEQTTHDETVPS

SEQ ID NO: 25 - protein, 421 aa, Artificial
  interferon lambda fusion protein
  misc_feature (131)..(131): Xaa can be any naturally occurring amino acid
MAAAWTVVLVTLVLGLAVAGPVPTSKPTTTGKGCHIGRFKSLSPQELASFKKARDALEESLKLKNWSCSSPVFPGNWDLRLLQVRERPVALEAELALTLKVLEAAAGPALEDVLDQPLHTLHHILSQLQAXIQPQPTAGPRPRGRLHHWLHRLQEAPKKESAGCLEASVTFNLFRLLTRDLKYVADGNLCLRTSTHPESTGGGGSGGGGSGGGGSGGGGSMVPPPENVRMNSVNFKNILQWESPAFAKGNLTFTAQYLSYRIFQDKCMNTTLTECDFSSLSKYGDHTLRVRAEFADEHSDWVNITFCPVDDTIIGPPGMQVEVLADSLHMRFLAPKIENEYETWTMKNVYNSWTYNVQYWKNGTDEKFQITPQYDFEVLRNLEPWTTYCVQVRGFLPDRNKAGEWSEPVCEQTTHDETVPS

SEQ ID NO: 26 - protein, 421 aa, Artificial
  interferon lambda fusion protein
  misc_feature (164)..(164): Xaa can be any naturally occurring amino acid
MAAAWTVVLVTLVLGLAVAGPVPTSKPTTTGKGCHIGRFKSLSPQELASFKKARDALEESLKLKNWSCSSPVFPGNWDLRLLQVRERPVALEAELALTLKVLEAAAGPALEDVLDQPLHTLHHILSQLQACIQPQPTAGPRPRGRLHHWLHRLQEAPKKESAGXLEASVTFNLFRLLTRDLKYVADGNLCLRTSTHPESTGGGGSGGGGSGGGGSGGGGSMVPPPENVRMNSVNFKNILQWESPAFAKGNLTFTAQYLSYRIFQDKCMNTTLTECDFSSLSKYGDHTLRVRAEFADEHSDWVNITFCPVDDTIIGPPGMQVEVLADSLHMRFLAPKIENEYETWTMKNVYNSWTYNVQYWKNGTDEKFQITPQYDFEVLRNLEPWTTYCVQVRGFLPDRNKAGEWSEPVCEQTTHDETVPS

SEQ ID NO: 27 - protein, 421 aa, Artificial
  interferon lambda fusion protein
  misc_feature (190)..(190): Xaa can be any naturally occurring amino acid
MAAAWTVVLVTLVLGLAVAGPVPTSKPTTTGKGCHIGRFKSLSPQELASFKKARDALEESLKLKNWSCSSPVFPGNWDLRLLQVRERPVALEAELALTLKVLEAAAGPALEDVLDQPLHTLHHILSQLQACIQPQPTAGPRPRGRLHHWLHRLQEAPKKESAGCLEASVTFNLFRLLTRDLKYVADGNLXLRTSTHPESTGGGGSGGGGSGGGGSGGGGSMVPPPENVRMNSVNFKNILQWESPAFAKGNLTFTAQYLSYRIFQDKCMNTTLTECDFSSLSKYGDHTLRVRAEFADEHSDWVNITFCPVDDTIIGPPGMQVEVLADSLHMRFLAPKIENEYETWTMKNVYNSWTYNVQYWKNGTDEKFQITPQYDFEVLRNLEPWTTYCVQVRGFLPDRNKAGEWSEPVCEQTTHDETVPS

SEQ ID NO: 28 - protein, 421 aa, Artificial
  interferon lambda fusion protein
  misc_feature (307)..(307): Xaa can be any naturally occurring amino acid
MAAAWTVVLVTLVLGLAVAGPVPTSKPTTTGKGCHIGRFKSLSPQELASFKKARDALEESLKLKNWSCSSPVFPGNWDLRLLQVRERPVALEAELALTLKVLEAAAGPALEDVLDQPLHTLHHILSQLQACIQPQPTAGPRPRGRLHHWLHRLQEAPKKESAGCLEASVTFNLFRLLTRDLKYVADGNLCLRTSTHPESTGGGGSGGGGSGGGGSGGGGSMVPPPENVRMNSVNFKNILQWESPAFAKGNLTFTAQYLSYRIFQDKCMNTTLTECDFSSLSKYGDHTLRVRAEFADEHSDWVNITFXPVDDTIIGPPGMQVEVLADSLHMRFLAPKIENEYETWTMKNVYNSWTYNVQYWKNGTDEKFQITPQYDFEVLRNLEPWTTYCVQVRGFLPDRNKAGEWSEPVCEQTTHDETVPS

SEQ ID NO: 29 - protein, 421 aa, Artificial
  interferon lambda fusion protein
  misc_feature (34)..(34): Xaa can be any naturally occurring amino acid
  misc_feature (307)..(307): Xaa can be any naturally occurring amino acid
MAAAWTVVLVTLVLGLAVAGPVPTSKPTTTGKGXHIGRFKSLSPQELASFKKARDALEESLKLKNWSCSSPVFPGNWDLRLLQVRERPVALEAELALTLKVLEAAAGPALEDVLDQPLHTLHHILSQLQACIQPQPTAGPRPRGRLHHWLHRLQEAPKKESAGCLEASVTFNLFRLLTRDLKYVADGNLCLRTSTHPESTGGGGSGGGGSGGGGSGGGGSMVPPPENVRMNSVNFKNILQWESPAFAKGNLTFTAQYLSYRIFQDKCMNTTLTECDFSSLSKYGDHTLRVRAEFADEHSDWVNITFXPVDDTIIGPPGMQVEVLADSLHMRFLAPKIENEYETWTMKNVYNSWTYNVQYWKNGTDEKFQITPQYDFEVLRNLEPWTTYCVQVRGFLPDRNKAGEWSEPVCEQTTHDETVPS

SEQ ID NO: 30 - protein, 421 aa, Artificial
  interferon lambda fusion protein
  misc_feature (68)..(68): Xaa can be any naturally occurring amino acid
  misc_feature (307)..(307): Xaa can be any naturally occurring amino acid
MAAAWTVVLVTLVLGLAVAGPVPTSKPTTTGKGCHIGRFKSLSPQELASFKKARDALEESLKLKNWSXSSPVFPGNWDLRLLQVRERPVALEAELALTLKVLEAAAGPALEDVLDQPLHTLHHILSQLQACIQPQPTAGPRPRGRLHHWLHRLQEAPKKESAGCLEASVTFNLFRLLTRDLKYVADGNLCLRTSTHPESTGGGGSGGGGSGGGGSGGGGSMVPPPENVRMNSVNFKNILQWESPAFAKGNLTFTAQYLSYRIFQDKCMNTTLTECDFSSLSKYGDHTLRVRAEFADEHSDWVNITFXPVDDTIIGPPGMQVEVLADSLHMRFLAPKIENEYETWTMKNVYNSWTYNVQYWKNGTDEKFQITPQYDFEVLRNLEPWTTYCVQVRGFLPDRNKAGEWSEPVCEQTTHDETVPS

SEQ ID NO: 31 - protein, 421 aa, Artificial
  interferon lambda fusion protein
  misc_feature (131)..(131): Xaa can be any naturally occurring amino acid
  misc_feature (307)..(307): Xaa can be any naturally occurring amino acid
MAAAWTVVLVTLVLGLAVAGPVPTSKPTTTGKGCHIGRFKSLSPQELASFKKARDALEESLKLKNWSCSSPVFPGNWDLRLLQVRERPVALEAELALTLKVLEAAAGPALEDVLDQPLHTLHHILSQLQAXIQPQPTAGPRPRGRLHHWLHRLQEAPKKESAGCLEASVTFNLFRLLTRDLKYVADGNLCLRTSTHPESTGGGGSGGGGSGGGGSGGGGSMVPPPENVRMNSVNFKNILQWESPAFAKGNLTFTAQYLSYRIFQDKCMNTTLTECDFSSLSKYGDHTLRVRAEFADEHSDWVNITFXPVDDTIIGPPGMQVEVLADSLHMRFLAPKIENEYETWTMKNVYNSWTYNVQYWKNGTDEKFQITPQYDFEVLRNLEPWTTYCVQVRGFLPDRNKAGEWSEPVCEQTTHDETVPS

SEQ ID NO: 32 - protein, 421 aa, Artificial
  interferon lambda fusion protein
  misc_feature (164)..(164): Xaa can be any naturally occurring amino acid
  misc_feature (307)..(307): Xaa can be any naturally occurring amino acid
MAAAWTVVLVTLVLGLAVAGPVPTSKPTTTGKGCHIGRFKSLSPQELASFKKARDALEESLKLKNWSCSSPVFPGNWDLRLLQVRERPVALEAELALTLKVLEAAAGPALEDVLDQPLHTLHHILSQLQACIQPQPTAGPRPRGRLHHWLHRLQEAPKKESAGXLEASVTFNLFRLLTRDLKYVADGNLCLRTSTHPESTGGGGSGGGGSGGGGSGGGGSMVPPPENVRMNSVNFKNILQWESPAFAKGNLTFTAQYLSYRIFQDKCMNTTLTECDFSSLSKYGDHTLRVRAEFADEHSDWVNITFXPVDDTIIGPPGMQVEVLADSLHMRFLAPKIENEYETWTMKNVYNSWTYNVQYWKNGTDEKFQITPQYDFEVLRNLEPWTTYCVQVRGFLPDRNKAGEWSEPVCEQTTHDETVPS

SEQ ID NO: 33 - protein, 421 aa, Artificial
  interferon lambda fusion protein
  misc_feature (190)..(190): Xaa can be any naturally occurring amino acid
  misc_feature (307)..(307): Xaa can be any naturally occurring amino acid
MAAAWTVVLVTLVLGLAVAGPVPTSKPTTTGKGCHIGRFKSLSPQELASFKKARDALEESLKLKNWSCSSPVFPGNWDLRLLQVRERPVALEAELALTLKVLEAAAGPALEDVLDQPLHTLHHILSQLQACIQPQPTAGPRPRGRLHHWLHRLQEAPKKESAGCLEASVTFNLFRLLTRDLKYVADGNLXLRTSTHPESTGGGGSGGGGSGGGGSGGGGSMVPPPENVRMNSVNFKNILQWESPAFAKGNLTFTAQYLSYRIFQDKCMNTTLTECDFSSLSKYGDHTLRVRAEFADEHSDWVNITFXPVDDTIIGPPGMQVEVLADSLHMRFLAPKIENEYETWTMKNVYNSWTYNVQYWKNGTDEKFQITPQYDFEVLRNLEPWTTYCVQVRGFLPDRNKAGEWSEPVCEQTTHDETVPS

SEQ ID NO: 34 - protein, 429 aa, Artificial
  interferon lambda fusion protein
MAGPERWGPLLLCLLQAAPGRPRLAPPQNVTLLSQNFSVYLTWLPGLGNPQDVTYFVAYQSSPTRRRWREVEECAGTKELLCSMMCLKKQDLYNKFKGRVRTVSPSSKSPWVESEYLDYLFEVEPAPPVLVLTQTEEILSANATYQLPPCMPPLDLKYEVAFWKEGAGNKTLFPVTPHGQPVQITLQPAASEHHCLSARTIYTFSVPKYSKFSKPTCFLLEVPEANWAGGGGSGGGGSGGGGSGGGGSGPVPTSKPTTTGKGCHIGRFKSLSPQELASFKKARDALEESLKLKNWSCSSPVFPGNWDLRLLQVRERPVALEAELALTLKVLEAAAGPALEDVLDQPLHTLHHILSQLQACIQPQPTAGPRPRGRLHHWLHRLQEAPKKESAGCLEASVTFNLFRLLTRDLKYVADGNLCLRTSTHPEST

SEQ ID NO: 35 - protein, 429 aa, Artificial
  interferon lambda fusion protein
  misc_feature (263)..(263): Xaa can be any naturally occurring amino acid
MAGPERWGPLLLCLLQAAPGRPRLAPPQNVTLLSQNFSVYLTWLPGLGNPQDVTYFVAYQSSPTRRRWREVEECAGTKELLCSMMCLKKQDLYNKFKGRVRTVSPSSKSPWVESEYLDYLFEVEPAPPVLVLTQTEEILSANATYQLPPCMPPLDLKYEVAFWKEGAGNKTLFPVTPHGQPVQITLQPAASEHHCLSARTIYTFSVPKYSKFSKPTCFLLEVPEANWAGGGGSGGGGSGGGGSGGGGSGPVPTSKPTTTGKGXHIGRFKSLSPQELASFKKARDALEESLKLKNWSCSSPVFPGNWDLRLLQVRERPVALEAELALTLKVLEAAAGPALEDVLDQPLHTLHHILSQLQACIQPQPTAGPRPRGRLHHWLHRLQEAPKKESAGCLEASVTFNLFRLLTRDLKYVADGNLCLRTSTHPEST

SEQ ID NO: 36 - protein, 429 aa, Artificial
  interferon lambda fusion protein
  misc_feature (297)..(297): Xaa can be any naturally occurring amino acid
MAGPERWGPLLLCLLQAAPGRPRLAPPQNVTLLSQNFSVYLTWLPGLGNPQDVTYFVAYQSSPTRRRWREVEECAGTKELLCSMMCLKKQDLYNKFKGRVRTVSPSSKSPWVESEYLDYLFEVEPAPPVLVLTQTEEILSANATYQLPPCMPPLDLKYEVAFWKEGAGNKTLFPVTPHGQPVQITLQPAASEHHCLSARTIYTFSVPKYSKFSKPTCFLLEVPEANWAGGGGSGGGGSGGGGSGGGGSGPVPTSKPTTTGKGCHIGRFKSLSPQELASFKKARDALEESLKLKNWSXSSPVFPGNWDLRLLQVRERPVALEAELALTLKVLEAAAGPALEDVLDQPLHTLHHILSQLQACIQPQPTAGPRPRGRLHHWLHRLQEAPKKESAGCLEASVTFNLFRLLTRDLKYVADGNLCLRTSTHPEST

SEQ ID NO: 37 - protein, 429 aa, Artificial
  interferon lambda fusion protein
  misc_feature (360)..(360): Xaa can be any naturally occurring amino acid
MAGPERWGPLLLCLLQAAPGRPRLAPPQNVTLLSQNFSVYLTWLPGLGNPQDVTYFVAYQSSPTRRRWREVEECAGTKELLCSMMCLKKQDLYNKFKGRVRTVSPSSKSPWVESEYLDYLFEVEPAPPVLVLTQTEEILSANATYQLPPCMPPLDLKYEVAFWKEGAGNKTLFPVTPHGQPVQITLQPAASEHHCLSARTIYTFSVPKYSKFSKPTCFLLEVPEANWAGGGGSGGGGSGGGGSGGGGSGPVPTSKPTTTGKGCHIGRFKSLSPQELASFKKARDALEESLKLKNWSCSSPVFPGNWDLRLLQVRERPVALEAELALTLKVLEAAAGPALEDVLDQPLHTLHHILSQLQAXIQPQPTAGPRPRGRLHHWLHRLQEAPKKESAGCLEASVTFNLFRLLTRDLKYVADGNLCLRTSTHPEST

SEQ ID NO: 38 - protein, 429 aa, Artificial
  interferon lambda fusion protein
  misc_feature (393)..(393): Xaa can be any naturally occurring amino acid
MAGPERWGPLLLCLLQAAPGRPRLAPPQNVTLLSQNFSVYLTWLPGLGNPQDVTYFVAYQSSPTRRRWREVEECAGTKELLCSMMCLKKQDLYNKFKGRVRTVSPSSKSPWVESEYLDYLFEVEPAPPVLVLTQTEEILSANATYQLPPCMPPLDLKYEVAFWKEGAGNKTLFPVTPHGQPVQITLQPAASEHHCLSARTIYTFSVPKYSKFSKPTCFLLEVPEANWAGGGGSGGGGSGGGGSGGGGSGPVPTSKPTTTGKGCHIGRFKSLSPQELASFKKARDALEESLKLKNWSCSSPVFPGNWDLRLLQVRERPVALEAELALTLKVLEAAAGPALEDVLDQPLHTLHHILSQLQACIQPQPTAGPRPRGRLHHWLHRLQEAPKKESAGXLEASVTFNLFRLLTRDLKYVADGNLCLRTSTHPEST

SEQ ID NO: 39 - protein, 429 aa, Artificial
  interferon lambda fusion protein
  misc_feature (419)..(419): Xaa can be any naturally occurring amino acid
MAGPERWGPLLLCLLQAAPGRPRLAPPQNVTLLSQNFSVYLTWLPGLGNPQDVTYFVAYQSSPTRRRWREVEECAGTKELLCSMMCLKKQDLYNKFKGRVRTVSPSSKSPWVESEYLDYLFEVEPAPPVLVLTQTEEILSANATYQLPPCMPPLDLKYEVAFWKEGAGNKTLFPVTPHGQPVQITLQPAASEHHCLSARTIYTFSVPKYSKFSKPTCFLLEVPEANWAGGGGSGGGGSGGGGSGGGGSGPVPTSKPTTTGKGCHIGRFKSLSPQELASFKKARDALEESLKLKNWSCSSPVFPGNWDLRLLQVRERPVALEAELALTLKVLEAAAGPALEDVLDQPLHTLHHILSQLQACIQPQPTAGPRPRGRLHHWLHRLQEAPKKESAGCLEASVTFNLFRLLTRDLKYVADGNLXLRTSTHPEST

SEQ ID NO: 40 - protein, 429 aa, Artificial
  interferon lambda fusion protein
  misc_feature (86)..(86): Xaa can be any naturally occurring amino acid
  misc_feature (150)..(150): Xaa can be any naturally occurring amino acid
MAGPERWGPLLLCLLQAAPGRPRLAPPQNVTLLSQNFSVYLTWLPGLGNPQDVTYFVAYQSSPTRRRWREVEECAGTKELLCSMMXLKKQDLYNKFKGRVRTVSPSSKSPWVESEYLDYLFEVEPAPPVLVLTQTEEILSANATYQLPPXMPPLDLKYEVAFWKEGAGNKTLFPVTPHGQPVQITLQPAASEHHCLSARTIYTFSVPKYSKFSKPTCFLLEVPEANWAGGGGSGGGGSGGGGSGGGGSGPVPTSKPTTTGKGCHIGRFKSLSPQELASFKKARDALEESLKLKNWSCSSPVFPGNWDLRLLQVRERPVALEAELALTLKVLEAAAGPALEDVLDQPLHTLHHILSQLQACIQPQPTAGPRPRGRLHHWLHRLQEAPKKESAGCLEASVTFNLFRLLTRDLKYVADGNLCLRTSTHPEST

SEQ ID NO: 41 - protein, 429 aa, Artificial
  interferon fusion protein
  misc_feature (86)..(86): Xaa can be any naturally occurring amino acid
  misc_feature (150)..(150): Xaa can be any naturally occurring amino acid
  misc_feature (263)..(263): Xaa can be any naturally occurring amino acid
MAGPERWGPLLLCLLQAAPGRPRLAPPQNVTLLSQNFSVYLTWLPGLGNPQDVTYFVAYQSSPTRRRWREVEECAGTKELLCSMMXLKKQDLYNKFKGRVRTVSPSSKSPWVESEYLDYLFEVEPAPPVLVLTQTEEILSANATYQLPPXMPPLDLKYEVAFWKEGAGNKTLFPVTPHGQPVQITLQPAASEHHCLSARTIYTFSVPKYSKFSKPTCFLLEVPEANWAGGGGSGGGGSGGGGSGGGGSGPVPTSKPTTTGKGXHIGRFKSLSPQELASFKKARDALEESLKLKNWSCSSPVFPGNWDLRLLQVRERPVALEAELALTLKVLEAAAGPALEDVLDQPLHTLHHILSQLQACIQPQPTAGPRPRGRLHHWLHRLQEAPKKESAGCLEASVTFNLFRLLTRDLKYVADGNLCLRTSTHPEST

SEQ ID NO: 42 - protein, 429 aa, Artificial
  interferon lambda fusion protein
  misc_feature (86)..(86): Xaa can be any naturally occurring amino acid
  misc_feature (150)..(150): Xaa can be any naturally occurring amino acid
  misc_feature (297)..(297): Xaa can be any naturally occurring amino acid
MAGPERWGPLLLCLLQAAPGRPRLAPPQNVTLLSQNFSVYLTWLPGLGNPQDVTYFVAYQSSPTRRRWREVEECAGTKELLCSMMXLKKQDLYNKFKGRVRTVSPSSKSPWVESEYLDYLFEVEPAPPVLVLTQTEEILSANATYQLPPXMPPLDLKYEVAFWKEGAGNKTLFPVTPHGQPVQITLQPAASEHHCLSARTIYTFSVPKYSKFSKPTCFLLEVPEANWAGGGGSGGGGSGGGGSGGGGSGPVPTSKPTTTGKGCHIGRFKSLSPQELASFKKARDALEESLKLKNWSXSSPVFPGNWDLRLLQVRERPVALEAELALTLKVLEAAAGPALEDVLDQPLHTLHHILSQLQACIQPQPTAGPRPRGRLHHWLHRLQEAPKKESAGCLEASVTFNLFRLLTRDLKYVADGNLCLRTSTHPEST

SEQ ID NO: 43 - protein, 429 aa, Artificial
  interferon lambda fusion protein
  misc_feature (86)..(86): Xaa can be any naturally occurring amino acid
  misc_feature (150)..(150): Xaa can be any naturally occurring amino acid
  misc_feature (360)..(360): Xaa can be any naturally occurring amino acid
MAGPERWGPLLLCLLQAAPGRPRLAPPQNVTLLSQNFSVYLTWLPGLGNPQDVTYFVAYQSSPTRRRWREVEECAGTKELLCSMMXLKKQDLYNKFKGRVRTVSPSSKSPWVESEYLDYLFEVEPAPPVLVLTQTEEILSANATYQLPPXMPPLDLKYEVAFWKEGAGNKTLFPVTPHGQPVQITLQPAASEHHCLSARTIYTFSVPKYSKFSKPTCFLLEVPEANWAGGGGSGGGGSGGGGSGGGGSGPVPTSKPTTTGKGCHIGRFKSLSPQELASFKKARDALEESLKLKNWSCSSPVFPGNWDLRLLQVRERPVALEAELALTLKVLEAAAGPALEDVLDQPLHTLHHILSQLQAXIQPQPTAGPRPRGRLHHWLHRLQEAPKKESAGCLEASVTFNLFRLLTRDLKYVADGNLCLRTSTHPEST

SEQ ID NO: 44 - protein, 429 aa, Artificial
  interferon lambda fusion protein
  misc_feature (86)..(86): Xaa can be any naturally occurring amino acid
  misc_feature (150)..(150): Xaa can be any naturally occurring amino acid
  misc_feature (393)..(393): Xaa can be any naturally occurring amino acid
MAGPERWGPLLLCLLQAAPGRPRLAPPQNVTLLSQNFSVYLTWLPGLGNPQDVTYFVAYQSSPTRRRWREVEECAGTKELLCSMMXLKKQDLYNKFKGRVRTVSPSSKSPWVESEYLDYLFEVEPAPPVLVLTQTEEILSANATYQLPPXMPPLDLKYEVAFWKEGAGNKTLFPVTPHGQPVQITLQPAASEHHCLSARTIYTFSVPKYSKFSKPTCFLLEVPEANWAGGGGSGGGGSGGGGSGGGGSGPVPTSKPTTTGKGCHIGRFKSLSPQELASFKKARDALEESLKLKNWSCSSPVFPGNWDLRLLQVRERPVALEAELALTLKVLEAAAGPALEDVLDQPLHTLHHILSQLQACIQPQPTAGPRPRGRLHHWLHRLQEAPKKESAGXLEASVTFNLFRLLTRDLKYVADGNLCLRTSTHPEST

SEQ ID NO: 45 - protein, 429 aa, Artificial
  interferon lambda fusion protein
  misc_feature (86)..(86): Xaa can be any naturally occurring amino acid
  misc_feature (150)..(150): Xaa can be any naturally occurring amino acid
  misc_feature (419)..(419): Xaa can be any naturally occurring amino acid
MAGPERWGPLLLCLLQAAPGRPRLAPPQNVTLLSQNFSVYLTWLPGLGNPQDVTYFVAYQSSPTRRRWREVEECAGTKELLCSMMXLKKQDLYNKFKGRVRTVSPSSKSPWVESEYLDYLFEVEPAPPVLVLTQTEEILSANATYQLPPXMPPLDLKYEVAFWKEGAGNKTLFPVTPHGQPVQITLQPAASEHHCLSARTIYTFSVPKYSKFSKPTCFLLEVPEANWAGGGGSGGGGSGGGGSGGGGSGPVPTSKPTTTGKGCHIGRFKSLSPQELASFKKARDALEESLKLKNWSCSSPVFPGNWDLRLLQVRERPVALEAELALTLKVLEAAAGPALEDVLDQPLHTLHHILSQLQACIQPQPTAGPRPRGRLHHWLHRLQEAPKKESAGCLEASVTFNLFRLLTRDLKYVADGNLXLRTSTHPEST

SEQ ID NO: 46 - protein, 426 aa, Artificial
  interferon lambda fusion protein
MAWSLGSWLGGCLLVSALGMVPPPENVRMNSVNFKNILQWESPAFAKGNLTFTAQYLSYRIFQDKCMNTTLTECDFSSLSKYGDHTLRVRAEFADEHSDWVNITFCPVDDTIIGPPGMQVEVLADSLHMRFLAPKIENEYETWTMKNVYNSWTYNVQYWKNGTDEKFQITPQYDFEVLRNLEPWTTYCVQVRGFLPDRNKAGEWSEPVCEQTTHDETVPSGGGGSGGGGSGGGGSGGGGSGGGGSGPVPTSKPTTTGKGCHIGRFKSLSPQELASFKKARDALEESLKLKNWSCSSPVFPGNWDLRLLQVRERPVALEAELALTLKVLEAAAGPALEDVLDQPLHTLHHILSQLQACIQPQPTAGPRPRGRLHHWLHRLQEAPKKESAGCLEASVTFNLFRLLTRDLKYVADGNLCLRTSTHPEST

SEQ ID NO: 47 - protein, 426 aa, Artificial
  interferon lambda fusion protein
  misc_feature (260)..(260): Xaa can be any naturally occurring amino acid
MAWSLGSWLGGCLLVSALGMVPPPENVRMNSVNFKNILQWESPAFAKGNLTFTAQYLSYRIFQDKCMNTTLTECDFSSLSKYGDHTLRVRAEFADEHSDWVNITFCPVDDTIIGPPGMQVEVLADSLHMRFLAPKIENEYETWTMKNVYNSWTYNVQYWKNGTDEKFQITPQYDFEVLRNLEPWTTYCVQVRGFLPDRNKAGEWSEPVCEQTTHDETVPSGGGGSGGGGSGGGGSGGGGSGGGGSGPVPTSKPTTTGKGXHIGRFKSLSPQELASFKKARDALEESLKLKNWSCSSPVFPGNWDLRLLQVRERPVALEAELALTLKVLEAAAGPALEDVLDQPLHTLHHILSQLQACIQPQPTAGPRPRGRLHHWLHRLQEAPKKESAGCLEASVTFNLFRLLTRDLKYVADGNLCLRTSTHPEST

SEQ ID NO: 48 - protein, 426 aa, Artificial
  interferon lambda fusion protein
  misc_feature (294)..(294): Xaa can be any naturally occurring amino acid
MAWSLGSWLGGCLLVSALGMVPPPENVRMNSVNFKNILQWESPAFAKGNLTFTAQYLSYRIFQDKCMNTTLTECDFSSLSKYGDHTLRVRAEFADEHSDWVNITFCPVDDTIIGPPGMQVEVLADSLHMRFLAPKIENEYETWTMKNVYNSWTYNVQYWKNGTDEKFQITPQYDFEVLRNLEPWTTYCVQVRGFLPDRNKAGEWSEPVCEQTTHDETVPSGGGGSGGGGSGGGGSGGGGSGGGGSGPVPTSKPTTTGKGCHIGRFKSLSPQELASFKKARDALEESLKLKNWSXSSPVFPGNWDLRLLQVRERPVALEAELALTLKVLEAAAGPALEDVLDQPLHTLHHILSQLQACIQPQPTAGPRPRGRLHHWLHRLQEAPKKESAGCLEASVTFNLFRLLTRDLKYVADGNLCLRTSTHPEST

SEQ ID NO: 49 - protein, 426 aa, Artificial
  interferon lambda fusion protein
  misc_feature (357)..(357): Xaa can be any naturally occurring amino acid
MAWSLGSWLGGCLLVSALGMVPPPENVRMNSVNFKNILQWESPAFAKGNLTFTAQYLSYRIFQDKCMNTTLTECDFSSLSKYGDHTLRVRAEFADEHSDWVNITFCPVDDTIIGPPGMQVEVLADSLHMRFLAPKIENEYETWTMKNVYNSWTYNVQYWKNGTDEKFQITPQYDFEVLRNLEPWTTYCVQVRGFLPDRNKAGEWSEPVCEQTTHDETVPSGGGGSGGGGSGGGGSGGGGSGGGGSGPVPTSKPTTTGKGCHIGRFKSLSPQELASFKKARDALEESLKLKNWSCSSPVFPGNWDLRLLQVRERPVALEAELALTLKVLEAAAGPALEDVLDQPLHTLHHILSQLQAXIQPQPTAGPRPRGRLHHWLHRLQEAPKKESAGCLEASVTFNLFRLLTRDLKYVADGNLCLRTSTHPEST

SEQ ID NO: 50 - protein, 426 aa, Artificial
  interferon lambda fusion protein
  misc_feature (390)..(390): Xaa can be any naturally occurring amino acid
MAWSLGSWLGGCLLVSALGMVPPPENVRMNSVNFKNILQWESPAFAKGNLTFTAQYLSYRIFQDKCMNTTLTECDFSSLSKYGDHTLRVRAEFADEHSDWVNITFCPVDDTIIGPPGMQVEVLADSLHMRFLAPKIENEYETWTMKNVYNSWTYNVQYWKNGTDEKFQITPQYDFEVLRNLEPWTTYCVQVRGFLPDRNKAGEWSEPVCEQTTHDETVPSGGGGSGGGGSGGGGSGGGGSGGGGSGPVPTSKPTTTGKGCHIGRFKSLSPQELASFKKARDALEESLKLKNWSCSSPVFPGNWDLRLLQVRERPVALEAELALTLKVLEAAAGPALEDVLDQPLHTLHHILSQLQACIQPQPTAGPRPRGRLHHWLHRLQEAPKKESAGXLEASVTFNLFRLLTRDLKYVADGNLCLRTSTHPEST

SEQ ID NO: 51 - protein, 426 aa, Artificial
  inteferon lambda fusion protein
  misc_feature (416)..(416): Xaa can be any naturally occurring amino acid
MAWSLGSWLGGCLLVSALGMVPPPENVRMNSVNFKNILQWESPAFAKGNLTFTAQYLSYRIFQDKCMNTTLTECDFSSLSKYGDHTLRVRAEFADEHSDWVNITFCPVDDTIIGPPGMQVEVLADSLHMRFLAPKIENEYETWTMKNVYNSWTYNVQYWKNGTDEKFQITPQYDFEVLRNLEPWTTYCVQVRGFLPDRNKAGEWSEPVCEQTTHDETVPSGGGGSGGGGSGGGGSGGGGSGGGGSGPVPTSKPTTTGKGCHIGRFKSLSPQELASFKKARDALEESLKLKNWSCSSPVFPGNWDLRLLQVRERPVALEAELALTLKVLEAAAGPALEDVLDQPLHTLHHILSQLQACIQPQPTAGPRPRGRLHHWLHRLQEAPKKESAGCLEASVTFNLFRLLTRDLKYVADGNLXLRTSTHPEST

SEQ ID NO: 52 - protein, 426 aa, Artificial
  interferon lambda fusion protein
  misc_feature (106)..(106): Xaa can be any naturally occurring amino acid
MAWSLGSWLGGCLLVSALGMVPPPENVRMNSVNFKNILQWESPAFAKGNLTFTAQYLSYRIFQDKCMNTTLTECDFSSLSKYGDHTLRVRAEFADEHSDWVNITFXPVDDTIIGPPGMQVEVLADSLHMRFLAPKIENEYETWTMKNVYNSWTYNVQYWKNGTDEKFQITPQYDFEVLRNLEPWTTYCVQVRGFLPDRNKAGEWSEPVCEQTTHDETVPSGGGGSGGGGSGGGGSGGGGSGGGGSGPVPTSKPTTTGKGCHIGRFKSLSPQELASFKKARDALEESLKLKNWSCSSPVFPGNWDLRLLQVRERPVALEAELALTLKVLEAAAGPALEDVLDQPLHTLHHILSQLQACIQPQPTAGPRPRGRLHHWLHRLQEAPKKESAGCLEASVTFNLFRLLTRDLKYVADGNLCLRTSTHPEST

SEQ ID NO: 53 - protein, 426 aa, Artificial
  interferon lambda fusion protein
  misc_feature (106)..(106): Xaa can be any naturally occurring amino acid
  misc_feature (260)..(260): Xaa can be any naturally occurring amino acid
MAWSLGSWLGGCLLVSALGMVPPPENVRMNSVNFKNILQWESPAFAKGNLTFTAQYLSYRIFQDKCMNTTLTECDFSSLSKYGDHTLRVRAEFADEHSDWVNITFXPVDDTIIGPPGMQVEVLADSLHMRFLAPKIENEYETWTMKNVYNSWTYNVQYWKNGTDEKFQITPQYDFEVLRNLEPWTTYCVQVRGFLPDRNKAGEWSEPVCEQTTHDETVPSGGGGSGGGGSGGGGSGGGGSGGGGSGPVPTSKPTTTGKGXHIGRFKSLSPQELASFKKARDALEESLKLKNWSCSSPVFPGNWDLRLLQVRERPVALEAELALTLKVLEAAAGPALEDVLDQPLHTLHHILSQLQACIQPQPTAGPRPRGRLHHWLHRLQEAPKKESAGCLEASVTFNLFRLLTRDLKYVADGNLCLRTSTHPEST

SEQ ID NO: 54 - protein, 426 aa, Artificial
  interferon lambda fusion protein
  misc_feature (106)..(106): Xaa can be any naturally occurring amino acid
  misc_feature (294)..(294): Xaa can be any naturally occurring amino acid
MAWSLGSWLGGCLLVSALGMVPPPENVRMNSVNFKNILQWESPAFAKGNLTFTAQYLSYRIFQDKCMNTTLTECDFSSLSKYGDHTLRVRAEFADEHSDWVNITFXPVDDTIIGPPGMQVEVLADSLHMRFLAPKIENEYETWTMKNVYNSWTYNVQYWKNGTDEKFQITPQYDFEVLRNLEPWTTYCVQVRGFLPDRNKAGEWSEPVCEQTTHDETVPSGGGGSGGGGSGGGGSGGGGSGGGGSGPVPTSKPTTTGKGCHIGRFKSLSPQELASFKKARDALEESLKLKNWSXSSPVFPGNWDLRLLQVRERPVALEAELALTLKVLEAAAGPALEDVLDQPLHTLHHILSQLQACIQPQPTAGPRPRGRLHHWLHRLQEAPKKESAGCLEASVTFNLFRLLTRDLKYVADGNLCLRTSTHPEST

SEQ ID NO: 55 - protein, 426 aa, Artificial
  interferon lambda fusion protein
  misc_feature (106)..(106): Xaa can be any naturally occurring amino acid
  misc_feature (357)..(357): Xaa can be any naturally occurring amino acid
MAWSLGSWLGGCLLVSALGMVPPPENVRMNSVNFKNILQWESPAFAKGNLTFTAQYLSYRIFQDKCMNTTLTECDFSSLSKYGDHTLRVRAEFADEHSDWVNITFXPVDDTIIGPPGMQVEVLADSLHMRFLAPKIENEYETWTMKNVYNSWTYNVQYWKNGTDEKFQITPQYDFEVLRNLEPWTTYCVQVRGFLPDRNKAGEWSEPVCEQTTHDETVPSGGGGSGGGGSGGGGSGGGGSGGGGSGPVPTSKPTTTGKGCHIGRFKSLSPQELASFKKARDALEESLKLKNWSCSSPVFPGNWDLRLLQVRERPVALEAELALTLKVLEAAAGPALEDVLDQPLHTLHHILSQLQAXIQPQPTAGPRPRGRLHHWLHRLQEAPKKESAGCLEASVTFNLFRLLTRDLKYVADGNLCLRTSTHPEST

SEQ ID NO: 56 - protein, 426 aa, Artificial
  interferon lambda fusion protein
  misc_feature (106)..(106): Xaa can be any naturally occurring amino acid
  misc_feature (390)..(390): Xaa can be any naturally occurring amino acid
MAWSLGSWLGGCLLVSALGMVPPPENVRMNSVNFKNILQWESPAFAKGNLTFTAQYLSYRIFQDKCMNTTLTECDFSSLSKYGDHTLRVRAEFADEHSDWVNITFXPVDDTIIGPPGMQVEVLADSLHMRFLAPKIENEYETWTMKNVYNSWTYNVQYWKNGTDEKFQITPQYDFEVLRNLEPWTTYCVQVRGFLPDRNKAGEWSEPVCEQTTHDETVPSGGGGSGGGGSGGGGSGGGGSGGGGSGPVPTSKPTTTGKGCHIGRFKSLSPQELASFKKARDALEESLKLKNWSCSSPVFPGNWDLRLLQVRERPVALEAELALTLKVLEAAAGPALEDVLDQPLHTLHHILSQLQACIQPQPTAGPRPRGRLHHWLHRLQEAPKKESAGXLEASVTFNLFRLLTRDLKYVADGNLCLRTSTHPEST

SEQ ID NO: 57 - protein, 426 aa, Artificial
  interferon lambda fusion protein
  misc_feature (106)..(106): Xaa can be any naturally occurring amino acid
  misc_feature (416)..(416): Xaa can be any naturally occurring amino acid
MAWSLGSWLGGCLLVSALGMVPPPENVRMNSVNFKNILQWESPAFAKGNLTFTAQYLSYRIFQDKCMNTTLTECDFSSLSKYGDHTLRVRAEFADEHSDWVNITFXPVDDTIIGPPGMQVEVLADSLHMRFLAPKIENEYETWTMKNVYNSWTYNVQYWKNGTDEKFQITPQYDFEVLRNLEPWTTYCVQVRGFLPDRNKAGEWSEPVCEQTTHDETVPSGGGGSGGGGSGGGGSGGGGSGGGGSGPVPTSKPTTTGKGCHIGRFKSLSPQELASFKKARDALEESLKLKNWSCSSPVFPGNWDLRLLQVRERPVALEAELALTLKVLEAAAGPALEDVLDQPLHTLHHILSQLQACIQPQPTAGPRPRGRLHHWLHRLQEAPKKESAGCLEASVTFNLFRLLTRDLKYVADGNLXLRTSTHPEST

SEQ ID NO: 58 - protein, 433 aa, Artificial
  interferon lambda fusion protein
MKLDMTGDCTPVLVLMAAVLTVTGAVPVARLHGALPDARGCHIAQFKSLSPQELQAFKRAKDALEESLLLKDCRCHSRLFPRTWDLRQLQVRERPMALEAELALTLKVLEATADTDPALVDVLDQPLHTLHHILSQFRACIQPQPTAGPRTRGRLHHWLYRLQEAPKKESPGCLEASVTFNLFRLLTRDLNCVASGDLCVGGGGSGGGGSGGGGSGGGGSGGGGSRPRLAPPQNVTLLSQNFSVYLTWLPGLGNPQDVTYFVAYQSSPTRRRWREVEECAGTKELLCSMMCLKKQDLYNKFKGRVRTVSPSSKSPWVESEYLDYLFEVEPAPPVLVLTQTEEILSANATYQLPPCMPPLDLKYEVAFWKEGAGNKTLFPVTPHGQPVQITLQPAASEHHCLSARTIYTFSVPKYSKFSKPTCFLLEVPEANWA

SEQ ID NO: 59 - protein, 433 aa, Artificial
  interferon lambda fusion protein
  misc_feature (41)..(41): Xaa can be any naturally occurring amino acid
MKLDMTGDCTPVLVLMAAVLTVTGAVPVARLHGALPDARGXHIAQFKSLSPQELQAFKRAKDALEESLLLKDCRCHSRLFPRTWDLRQLQVRERPMALEAELALTLKVLEATADTDPALVDVLDQPLHTLHHILSQFRACIQPQPTAGPRTRGRLHHWLYRLQEAPKKESPGCLEASVTFNLFRLLTRDLNCVASGDLCVGGGGSGGGGSGGGGSGGGGSGGGGSRPRLAPPQNVTLLSQNFSVYLTWLPGLGNPQDVTYFVAYQSSPTRRRWREVEECAGTKELLCSMMCLKKQDLYNKFKGRVRTVSPSSKSPWVESEYLDYLFEVEPAPPVLVLTQTEEILSANATYQLPPCMPPLDLKYEVAFWKEGAGNKTLFPVTPHGQPVQITLQPAASEHHCLSARTIYTFSVPKYSKFSKPTCFLLEVPEANWA

SEQ ID NO: 60 - protein, 433 aa, Artificial
  interferon fusion protein
  misc_feature (73)..(73): Xaa can be any naturally occurring amino acid
MKLDMTGDCTPVLVLMAAVLTVTGAVPVARLHGALPDARGCHIAQFKSLSPQELQAFKRAKDALEESLLLKDXRCHSRLFPRTWDLRQLQVRERPMALEAELALTLKVLEATADTDPALVDVLDQPLHTLHHILSQFRACIQPQPTAGPRTRGRLHHWLYRLQEAPKKESPGCLEASVTFNLFRLLTRDLNCVASGDLCVGGGGSGGGGSGGGGSGGGGSGGGGSRPRLAPPQNVTLLSQNFSVYLTWLPGLGNPQDVTYFVAYQSSPTRRRWREVEECAGTKELLCSMMCLKKQDLYNKFKGRVRTVSPSSKSPWVESEYLDYLFEVEPAPPVLVLTQTEEILSANATYQLPPCMPPLDLKYEVAFWKEGAGNKTLFPVTPHGQPVQITLQPAASEHHCLSARTIYTFSVPKYSKFSKPTCFLLEVPEANWA

SEQ ID NO: 61 - protein, 433 aa, Artificial
  interferon lambda fusion protein
  misc_feature (75)..(75): Xaa can be any naturally occurring amino acid
MKLDMTGDCTPVLVLMAAVLTVTGAVPVARLHGALPDARGCHIAQFKSLSPQELQAFKRAKDALEESLLLKDCRXHSRLFPRTWDLRQLQVRERPMALEAELALTLKVLEATADTDPALVDVLDQPLHTLHHILSQFRACIQPQPTAGPRTRGRLHHWLYRLQEAPKKESPGCLEASVTFNLFRLLTRDLNCVASGDLCVGGGGSGGGGSGGGGSGGGGSGGGGSRPRLAPPQNVTLLSQNFSVYLTWLPGLGNPQDVTYFVAYQSSPTRRRWREVEECAGTKELLCSMMCLKKQDLYNKFKGRVRTVSPSSKSPWVESEYLDYLFEVEPAPPVLVLTQTEEILSANATYQLPPCMPPLDLKYEVAFWKEGAGNKTLFPVTPHGQPVQITLQPAASEHHCLSARTIYTFSVPKYSKFSKPTCFLLEVPEANWA

SEQ ID NO: 62 - protein, 433 aa, Artificial
  interferon lambda fusion protein
  misc_feature (140)..(140): Xaa can be any naturally occurring amino acid
MKLDMTGDCTPVLVLMAAVLTVTGAVPVARLHGALPDARGCHIAQFKSLSPQELQAFKRAKDALEESLLLKDCRCHSRLFPRTWDLRQLQVRERPMALEAELALTLKVLEATADTDPALVDVLDQPLHTLHHILSQFRAXIQPQPTAGPRTRGRLHHWLYRLQEAPKKESPGCLEASVTFNLFRLLTRDLNCVASGDLCVGGGGSGGGGSGGGGSGGGGSGGGGSRPRLAPPQNVTLLSQNFSVYLTWLPGLGNPQDVTYFVAYQSSPTRRRWREVEECAGTKELLCSMMCLKKQDLYNKFKGRVRTVSPSSKSPWVESEYLDYLFEVEPAPPVLVLTQTEEILSANATYQLPPCMPPLDLKYEVAFWKEGAGNKTLFPVTPHGQPVQITLQPAASEHHCLSARTIYTFSVPKYSKFSKPTCFLLEVPEANWA

SEQ ID NO: 63 - protein, 433 aa, Artificial
  interferon lambda fusion protein
  misc_feature (173)..(173): Xaa can be any naturally occurring amino acid
MKLDMTGDCTPVLVLMAAVLTVTGAVPVARLHGALPDARGCHIAQFKSLSPQELQAFKRAKDALEESLLLKDCRCHSRLFPRTWDLRQLQVRERPMALEAELALTLKVLEATADTDPALVDVLDQPLHTLHHILSQFRACIQPQPTAGPRTRGRLHHWLYRLQEAPKKESPGXLEASVTFNLFRLLTRDLNCVASGDLCVGGGGSGGGGSGGGGSGGGGSGGGGSRPRLAPPQNVTLLSQNFSVYLTWLPGLGNPQDVTYFVAYQSSPTRRRWREVEECAGTKELLCSMMCLKKQDLYNKFKGRVRTVSPSSKSPWVESEYLDYLFEVEPAPPVLVLTQTEEILSANATYQLPPCMPPLDLKYEVAFWKEGAGNKTLFPVTPHGQPVQITLQPAASEHHCLSARTIYTFSVPKYSKFSKPTCFLLEVPEANWA

SEQ ID NO: 64 - protein, 433 aa, Artificial
  interferon lambda fusion protein
  misc_feature (192)..(192): Xaa can be any naturally occurring amino acid
MKLDMTGDCTPVLVLMAAVLTVTGAVPVARLHGALPDARGCHIAQFKSLSPQELQAFKRAKDALEESLLLKDCRCHSRLFPRTWDLRQLQVRERPMALEAELALTLKVLEATADTDPALVDVLDQPLHTLHHILSQFRACIQPQPTAGPRTRGRLHHWLYRLQEAPKKESPGCLEASVTFNLFRLLTRDLNXVASGDLCVGGGGSGGGGSGGGGSGGGGSGGGGSRPRLAPPQNVTLLSQNFSVYLTWLPGLGNPQDVTYFVAYQSSPTRRRWREVEECAGTKELLCSMMCLKKQDLYNKFKGRVRTVSPSSKSPWVESEYLDYLFEVEPAPPVLVLTQTEEILSANATYQLPPCMPPLDLKYEVAFWKEGAGNKTLFPVTPHGQPVQITLQPAASEHHCLSARTIYTFSVPKYSKFSKPTCFLLEVPEANWA

SEQ ID NO: 65 - protein, 433 aa, Artificial
  interferon lambda fusion protein
  misc_feature (199)..(199): Xaa can be any naturally occurring amino acid
MKLDMTGDCTPVLVLMAAVLTVTGAVPVARLHGALPDARGCHIAQFKSLSPQELQAFKRAKDALEESLLLKDCRCHSRLFPRTWDLRQLQVRERPMALEAELALTLKVLEATADTDPALVDVLDQPLHTLHHILSQFRACIQPQPTAGPRTRGRLHHWLYRLQEAPKKESPGCLEASVTFNLFRLLTRDLNCVASGDLXVGGGGSGGGGSGGGGSGGGGSGGGGSRPRLAPPQNVTLLSQNFSVYLTWLPGLGNPQDVTYFVAYQSSPTRRRWREVEECAGTKELLCSMMCLKKQDLYNKFKGRVRTVSPSSKSPWVESEYLDYLFEVEPAPPVLVLTQTEEILSANATYQLPPCMPPLDLKYEVAFWKEGAGNKTLFPVTPHGQPVQITLQPAASEHHCLSARTIYTFSVPKYSKFSKPTCFLLEVPEANWA

SEQ ID NO: 66 - protein, 433 aa, Artificial
  interferon lambda fusion protein
  misc_feature (291)..(291): Xaa can be any naturally occurring amino acid
  misc_feature (355)..(355): Xaa can be any naturally occurring amino acid
MKLDMTGDCTPVLVLMAAVLTVTGAVPVARLHGALPDARGCHIAQFKSLSPQELQAFKRAKDALEESLLLKDCRCHSRLFPRTWDLRQLQVRERPMALEAELALTLKVLEATADTDPALVDVLDQPLHTLHHILSQFRACIQPQPTAGPRTRGRLHHWLYRLQEAPKKESPGCLEASVTFNLFRLLTRDLNCVASGDLCVGGGGSGGGGSGGGGSGGGGSGGGGSRPRLAPPQNVTLLSQNFSVYLTWLPGLGNPQDVTYFVAYQSSPTRRRWREVEECAGTKELLCSMMXLKKQDLYNKFKGRVRTVSPSSKSPWVESEYLDYLFEVEPAPPVLVLTQTEEILSANATYQLPPXMPPLDLKYEVAFWKEGAGNKTLFPVTPHGQPVQITLQPAASEHHCLSARTIYTFSVPKYSKFSKPTCFLLEVPEANWA

SEQ ID NO: 67 - protein, 433 aa, Artificial
  interferon lambda fusion protein
  misc_feature (41)..(41): Xaa can be any naturally occurring amino acid
  misc_feature (291)..(291): Xaa can be any naturally occurring amino acid
  misc_feature (355)..(355): Xaa can be any naturally occurring amino acid
MKLDMTGDCTPVLVLMAAVLTVTGAVPVARLHGALPDARGXHIAQFKSLSPQELQAFKRAKDALEESLLLKDCRCHSRLFPRTWDLRQLQVRERPMALEAELALTLKVLEATADTDPALVDVLDQPLHTLHHILSQFRACIQPQPTAGPRTRGRLHHWLYRLQEAPKKESPGCLEASVTFNLFRLLTRDLNCVASGDLCVGGGGSGGGGSGGGGSGGGGSGGGGSRPRLAPPQNVTLLSQNFSVYLTWLPGLGNPQDVTYFVAYQSSPTRRRWREVEECAGTKELLCSMMXLKKQDLYNKFKGRVRTVSPSSKSPWVESEYLDYLFEVEPAPPVLVLTQTEEILSANATYQLPPXMPPLDLKYEVAFWKEGAGNKTLFPVTPHGQPVQITLQPAASEHHCLSARTIYTFSVPKYSKFSKPTCFLLEVPEANWA

SEQ ID NO: 68 - protein, 433 aa, Artificial
  interferon lambda fusion protein
  misc_feature (73)..(73): Xaa can be any naturally occurring amino acid
  misc_feature (291)..(291): Xaa can be any naturally occurring amino acid
  misc_feature (355)..(355): Xaa can be any naturally occurring amino acid
MKLDMTGDCTPVLVLMAAVLTVTGAVPVARLHGALPDARGCHIAQFKSLSPQELQAFKRAKDALEESLLLKDXRCHSRLFPRTWDLRQLQVRERPMALEAELALTLKVLEATADTDPALVDVLDQPLHTLHHILSQFRACIQPQPTAGPRTRGRLHHWLYRLQEAPKKESPGCLEASVTFNLFRLLTRDLNCVASGDLCVGGGGSGGGGSGGGGSGGGGSGGGGSRPRLAPPQNVTLLSQNFSVYLTWLPGLGNPQDVTYFVAYQSSPTRRRWREVEECAGTKELLCSMMXLKKQDLYNKFKGRVRTVSPSSKSPWVESEYLDYLFEVEPAPPVLVLTQTEEILSANATYQLPPXMPPLDLKYEVAFWKEGAGNKTLFPVTPHGQPVQITLQPAASEHHCLSARTIYTFSVPKYSKFSKPTCFLLEVPEANWA

SEQ ID NO: 69 - protein, 433 aa, Artificial
  interferon lambda fusion protein
  misc_feature (75)..(75): Xaa can be any naturally occurring amino acid
  misc_feature (291)..(291): Xaa can be any naturally occurring amino acid
  misc_feature (355)..(355): Xaa can be any naturally occurring amino acid
MKLDMTGDCTPVLVLMAAVLTVTGAVPVARLHGALPDARGCHIAQFKSLSPQELQAFKRAKDALEESLLLKDCRXHSRLFPRTWDLRQLQVRERPMALEAELALTLKVLEATADTDPALVDVLDQPLHTLHHILSQFRACIQPQPTAGPRTRGRLHHWLYRLQEAPKKESPGCLEASVTFNLFRLLTRDLNCVASGDLCVGGGGSGGGGSGGGGSGGGGSGGGGSRPRLAPPQNVTLLSQNFSVYLTWLPGLGNPQDVTYFVAYQSSPTRRRWREVEECAGTKELLCSMMXLKKQDLYNKFKGRVRTVSPSSKSPWVESEYLDYLFEVEPAPPVLVLTQTEEILSANATYQLPPXMPPLDLKYEVAFWKEGAGNKTLFPVTPHGQPVQITLQPAASEHHCLSARTIYTFSVPKYSKFSKPTCFLLEVPEANWA

SEQ ID NO: 70 - protein, 433 aa, Artificial
  interferon lambda fusion protein
  misc_feature (140)..(140): Xaa can be any naturally occurring amino acid
  misc_feature (291)..(291): Xaa can be any naturally occurring amino acid
  misc_feature (355)..(355): Xaa can be any naturally occurring amino acid
MKLDMTGDCTPVLVLMAAVLTVTGAVPVARLHGALPDARGCHIAQFKSLSPQELQAFKRAKDALEESLLLKDCRCHSRLFPRTWDLRQLQVRERPMALEAELALTLKVLEATADTDPALVDVLDQPLHTLHHILSQFRAXIQPQPTAGPRTRGRLHHWLYRLQEAPKKESPGCLEASVTFNLFRLLTRDLNCVASGDLCVGGGGSGGGGSGGGGSGGGGSGGGGSRPRLAPPQNVTLLSQNFSVYLTWLPGLGNPQDVTYFVAYQSSPTRRRWREVEECAGTKELLCSMMXLKKQDLYNKFKGRVRTVSPSSKSPWVESEYLDYLFEVEPAPPVLVLTQTEEILSANATYQLPPXMPPLDLKYEVAFWKEGAGNKTLFPVTPHGQPVQITLQPAASEHHCLSARTIYTFSVPKYSKFSKPTCFLLEVPEANWA

SEQ ID NO: 71 - protein, 433 aa, Artificial
  interferon lambda fusion protein
  misc_feature (173)..(173): Xaa can be any naturally occurring amino acid
  misc_feature (291)..(291): Xaa can be any naturally occurring amino acid
  misc_feature (355)..(355): Xaa can be any naturally occurring amino acid
MKLDMTGDCTPVLVLMAAVLTVTGAVPVARLHGALPDARGCHIAQFKSLSPQELQAFKRAKDALEESLLLKDCRCHSRLFPRTWDLRQLQVRERPMALEAELALTLKVLEATADTDPALVDVLDQPLHTLHHILSQFRACIQPQPTAGPRTRGRLHHWLYRLQEAPKKESPGXLEASVTFNLFRLLTRDLNCVASGDLCVGGGGSGGGGSGGGGSGGGGSGGGGSRPRLAPPQNVTLLSQNFSVYLTWLPGLGNPQDVTYFVAYQSSPTRRRWREVEECAGTKELLCSMMXLKKQDLYNKFKGRVRTVSPSSKSPWVESEYLDYLFEVEPAPPVLVLTQTEEILSANATYQLPPXMPPLDLKYEVAFWKEGAGNKTLFPVTPHGQPVQITLQPAASEHHCLSARTIYTFSVPKYSKFSKPTCFLLEVPEANWA

SEQ ID NO: 72 - protein, 433 aa, Artificial
  interferon lambda fusion protein
  misc_feature (192)..(192): Xaa can be any naturally occurring amino acid
  misc_feature (291)..(291): Xaa can be any naturally occurring amino acid
  misc_feature (355)..(355): Xaa can be any naturally occurring amino acid
MKLDMTGDCTPVLVLMAAVLTVTGAVPVARLHGALPDARGCHIAQFKSLSPQELQAFKRAKDALEESLLLKDCRCHSRLFPRTWDLRQLQVRERPMALEAELALTLKVLEATADTDPALVDVLDQPLHTLHHILSQFRACIQPQPTAGPRTRGRLHHWLYRLQEAPKKESPGCLEASVTFNLFRLLTRDLNXVASGDLCVGGGGSGGGGSGGGGSGGGGSGGGGSRPRLAPPQNVTLLSQNFSVYLTWLPGLGNPQDVTYFVAYQSSPTRRRWREVEECAGTKELLCSMMXLKKQDLYNKFKGRVRTVSPSSKSPWVESEYLDYLFEVEPAPPVLVLTQTEEILSANATYQLPPXMPPLDLKYEVAFWKEGAGNKTLFPVTPHGQPVQITLQPAASEHHCLSARTIYTFSVPKYSKFSKPTCFLLEVPEANWA

SEQ ID NO: 73 - protein, 433 aa, Artificial
  interferon lambda fusion protein
  misc_feature (199)..(199): Xaa can be any naturally occurring amino acid
  misc_feature (291)..(291): Xaa can be any naturally occurring amino acid
  misc_feature (355)..(355): Xaa can be any naturally occurring amino acid
MKLDMTGDCTPVLVLMAAVLTVTGAVPVARLHGALPDARGCHIAQFKSLSPQELQAFKRAKDALEESLLLKDCRCHSRLFPRTWDLRQLQVRERPMALEAELALTLKVLEATADTDPALVDVLDQPLHTLHHILSQFRACIQPQPTAGPRTRGRLHHWLYRLQEAPKKESPGCLEASVTFNLFRLLTRDLNCVASGDLXVGGGGSGGGGSGGGGSGGGGSGGGGSRPRLAPPQNVTLLSQNFSVYLTWLPGLGNPQDVTYFVAYQSSPTRRRWREVEECAGTKELLCSMMXLKKQDLYNKFKGRVRTVSPSSKSPWVESEYLDYLFEVEPAPPVLVLTQTEEILSANATYQLPPXMPPLDLKYEVAFWKEGAGNKTLFPVTPHGQPVQITLQPAASEHHCLSARTIYTFSVPKYSKFSKPTCFLLEVPEANWA

SEQ ID NO: 74 - protein, 421 aa, Artificial
  interferon lambda fusion protein
MKLDMTGDCTPVLVLMAAVLTVTGAVPVARLHGALPDARGCHIAQFKSLSPQELQAFKRAKDALEESLLLKDCRCHSRLFPRTWDLRQLQVRERPMALEAELALTLKVLEATADTDPALVDVLDQPLHTLHHILSQFRACIQPQPTAGPRTRGRLHHWLYRLQEAPKKESPGCLEASVTFNLFRLLTRDLNCVASGDLCVGGGGSGGGGSGGGGSGGGGSMVPPPENVRMNSVNFKNILQWESPAFAKGNLTFTAQYLSYRIFQDKCMNTTLTECDFSSLSKYGDHTLRVRAEFADEHSDWVNITFCPVDDTIIGPPGMQVEVLADSLHMRFLAPKIENEYETWTMKNVYNSWTYNVQYWKNGTDEKFQITPQYDFEVLRNLEPWTTYCVQVRGFLPDRNKAGEWSEPVCEQTTHDETVPS

SEQ ID NO: 75 - protein, 421 aa, Artificial
  interferon lambda fusion protein
  misc_feature (41)..(41): Xaa can be any naturally occurring amino acid
MKLDMTGDCTPVLVLMAAVLTVTGAVPVARLHGALPDARGXHIAQFKSLSPQELQAFKRAKDALEESLLLKDCRCHSRLFPRTWDLRQLQVRERPMALEAELALTLKVLEATADTDPALVDVLDQPLHTLHHILSQFRACIQPQPTAGPRTRGRLHHWLYRLQEAPKKESPGCLEASVTFNLFRLLTRDLNCVASGDLCVGGGGSGGGGSGGGGSGGGGSMVPPPENVRMNSVNFKNILQWESPAFAKGNLTFTAQYLSYRIFQDKCMNTTLTECDFSSLSKYGDHTLRVRAEFADEHSDWVNITFCPVDDTIIGPPGMQVEVLADSLHMRFLAPKIENEYETWTMKNVYNSWTYNVQYWKNGTDEKFQITPQYDFEVLRNLEPWTTYCVQVRGFLPDRNKAGEWSEPVCEQTTHDETVPS

SEQ ID NO: 76 - protein, 421 aa, Artificial
  interferon lambda fusion protein
  misc_feature (73)..(73): Xaa can be any naturally occurring amino acid
MKLDMTGDCTPVLVLMAAVLTVTGAVPVARLHGALPDARGCHIAQFKSLSPQELQAFKRAKDALEESLLLKDXRCHSRLFPRTWDLRQLQVRERPMALEAELALTLKVLEATADTDPALVDVLDQPLHTLHHILSQFRACIQPQPTAGPRTRGRLHHWLYRLQEAPKKESPGCLEASVTFNLFRLLTRDLNCVASGDLCVGGGGSGGGGSGGGGSGGGGSMVPPPENVRMNSVNFKNILQWESPAFAKGNLTFTAQYLSYRIFQDKCMNTTLTECDFSSLSKYGDHTLRVRAEFADEHSDWVNITFCPVDDTIIGPPGMQVEVLADSLHMRFLAPKIENEYETWTMKNVYNSWTYNVQYWKNGTDEKFQITPQYDFEVLRNLEPWTTYCVQVRGFLPDRNKAGEWSEPVCEQTTHDETVPS

SEQ ID NO: 77 - protein, 421 aa, Artificial
  interferon lambda fusion protein
  misc_feature (75)..(75): Xaa can be any naturally occurring amino acid
MKLDMTGDCTPVLVLMAAVLTVTGAVPVARLHGALPDARGCHIAQFKSLSPQELQAFKRAKDALEESLLLKDCRXHSRLFPRTWDLRQLQVRERPMALEAELALTLKVLEATADTDPALVDVLDQPLHTLHHILSQFRACIQPQPTAGPRTRGRLHHWLYRLQEAPKKESPGCLEASVTFNLFRLLTRDLNCVASGDLCVGGGGSGGGGSGGGGSGGGGSMVPPPENVRMNSVNFKNILQWESPAFAKGNLTFTAQYLSYRIFQDKCMNTTLTECDFSSLSKYGDHTLRVRAEFADEHSDWVNITFCPVDDTIIGPPGMQVEVLADSLHMRFLAPKIENEYETWTMKNVYNSWTYNVQYWKNGTDEKFQITPQYDFEVLRNLEPWTTYCVQVRGFLPDRNKAGEWSEPVCEQTTHDETVPS

SEQ ID NO: 78 - protein, 421 aa, Artificial; identical to SEQ ID NO: 77
  interferon lambda fusion protein
  misc_feature (75)..(75): Xaa can be any naturally occurring amino acid

SEQ ID NO: 79 - protein, 421 aa, Artificial
  interferon lambda fusion protein
  misc_feature (140)..(140): Xaa can be any naturally occurring amino acid
MKLDMTGDCTPVLVLMAAVLTVTGAVPVARLHGALPDARGCHIAQFKSLSPQELQAFKRAKDALEESLLLKDCRCHSRLFPRTWDLRQLQVRERPMALEAELALTLKVLEATADTDPALVDVLDQPLHTLHHILSQFRAXIQPQPTAGPRTRGRLHHWLYRLQEAPKKESPGCLEASVTFNLFRLLTRDLNCVASGDLCVGGGGSGGGGSGGGGSGGGGSMVPPPENVRMNSVNFKNILQWESPAFAKGNLTFTAQYLSYRIFQDKCMNTTLTECDFSSLSKYGDHTLRVRAEFADEHSDWVNITFCPVDDTIIGPPGMQVEVLADSLHMRFLAPKIENEYETWTMKNVYNSWTYNVQYWKNGTDEKFQITPQYDFEVLRNLEPWTTYCVQVRGFLPDRNKAGEWSEPVCEQTTHDETVPS

SEQ ID NO: 80 - protein, 421 aa, Artificial
  interferon lambda fusion protein
  misc_feature (173)..(173): Xaa can be any naturally occurring amino acid
MKLDMTGDCTPVLVLMAAVLTVTGAVPVARLHGALPDARGCHIAQFKSLSPQELQAFKRAKDALEESLLLKDCRCHSRLFPRTWDLRQLQVRERPMALEAELALTLKVLEATADTDPALVDVLDQPLHTLHHILSQFRACIQPQPTAGPRTRGRLHHWLYRLQEAPKKESPGXLEASVTFNLFRLLTRDLNCVASGDLCVGGGGSGGGGSGGGGSGGGGSMVPPPENVRMNSVNFKNILQWESPAFAKGNLTFTAQYLSYRIFQDKCMNTTLTECDFSSLSKYGDHTLRVRAEFADEHSDWVNITFCPVDDTIIGPPGMQVEVLADSLHMRFLAPKIENEYETWTMKNVYNSWTYNVQYWKNGTDEKFQITPQYDFEVLRNLEPWTTYCVQVRGFLPDRNKAGEWSEPVCEQTTHDETVPS

SEQ ID NO: 81 - protein, 421 aa, Artificial
  interferon lambda fusion protein
  misc_feature (192)..(192): Xaa can be any naturally occurring amino acid
MKLDMTGDCTPVLVLMAAVLTVTGAVPVARLHGALPDARGCHIAQFKSLSPQELQAFKRAKDALEESLLLKDCRCHSRLFPRTWDLRQLQVRERPMALEAELALTLKVLEATADTDPALVDVLDQPLHTLHHILSQFRACIQPQPTAGPRTRGRLHHWLYRLQEAPKKESPGCLEASVTFNLFRLLTRDLNXVASGDLCVGGGGSGGGGSGGGGSGGGGSMVPPPENVRMNSVNFKNILQWESPAFAKGNLTFTAQYLSYRIFQDKCMNTTLTECDFSSLSKYGDHTLRVRAEFADEHSDWVNITFCPVDDTIIGPPGMQVEVLADSLHMRFLAPKIENEYETWTMKNVYNSWTYNVQYWKNGTDEKFQITPQYDFEVLRNLEPWTTYCVQVRGFLPDRNKAGEWSEPVCEQTTHDETVPS

SEQ ID NO: 82 - protein, 421 aa, Artificial
  interferon lambda fusion protein
  misc_feature (199)..(199): Xaa can be any naturally occurring amino acid
MKLDMTGDCTPVLVLMAAVLTVTGAVPVARLHGALPDARGCHIAQFKSLSPQELQAFKRAKDALEESLLLKDCRCHSRLFPRTWDLRQLQVRERPMALEAELALTLKVLEATADTDPALVDVLDQPLHTLHHILSQFRACIQPQPTAGPRTRGRLHHWLYRLQEAPKKESPGCLEASVTFNLFRLLTRDLNCVASGDLXVGGGGSGGGGSGGGGSGGGGSMVPPPENVRMNSVNFKNILQWESPAFAKGNLTFTAQYLSYRIFQDKCMNTTLTECDFSSLSKYGDHTLRVRAEFADEHSDWVNITFCPVDDTIIGPPGMQVEVLADSLHMRFLAPKIENEYETWTMKNVYNSWTYNVQYWKNGTDEKFQITPQYDFEVLRNLEPWTTYCVQVRGFLPDRNKAGEWSEPVCEQTTHDETVPS

SEQ ID NO: 83 - protein, 421 aa, Artificial
  interferon lambda fusion protein
  misc_feature (307)..(307): Xaa can be any naturally occurring amino acid
MKLDMTGDCTPVLVLMAAVLTVTGAVPVARLHGALPDARGCHIAQFKSLSPQELQAFKRAKDALEESLLLKDCRCHSRLFPRTWDLRQLQVRERPMALEAELALTLKVLEATADTDPALVDVLDQPLHTLHHILSQFRACIQPQPTAGPRTRGRLHHWLYRLQEAPKKESPGCLEASVTFNLFRLLTRDLNCVASGDLCVGGGGSGGGGSGGGGSGGGGSMVPPPENVRMNSVNFKNILQWESPAFAKGNLTFTAQYLSYRIFQDKCMNTTLTECDFSSLSKYGDHTLRVRAEFADEHSDWVNITFXPVDDTIIGPPGMQVEVLADSLHMRFLAPKIENEYETWTMKNVYNSWTYNVQYWKNGTDEKFQITPQYDFEVLRNLEPWTTYCVQVRGFLPDRNKAGEWSEPVCEQTTHDETVPS

SEQ ID NO: 84 - protein, 421 aa, Artificial
  interferon lambda fusion protein
  misc_feature (41)..(41): Xaa can be any naturally occurring amino acid
  misc_feature (307)..(307): Xaa can be any naturally occurring amino acid
MKLDMTGDCTPVLVLMAAVLTVTGAVPVARLHGALPDARGXHIAQFKSLSPQELQAFKRAKDALEESLLLKDCRCHSRLFPRTWDLRQLQVRERPMALEAELALTLKVLEATADTDPALVDVLDQPLHTLHHILSQFRACIQPQPTAGPRTRGRLHHWLYRLQEAPKKESPGCLEASVTFNLFRLLTRDLNCVASGDLCVGGGGSGGGGSGGGGSGGGGSMVPPPENVRMNSVNFKNILQWESPAFAKGNLTFTAQYLSYRIFQDKCMNTTLTECDFSSLSKYGDHTLRVRAEFADEHSDWVNITFXPVDDTIIGPPGMQVEVLADSLHMRFLAPKIENEYETWTMKNVYNSWTYNVQYWKNGTDEKFQITPQYDFEVLRNLEPWTTYCVQVRGFLPDRNKAGEWSEPVCEQTTHDETVPS

SEQ ID NO: 85 - protein, 421 aa, Artificial
  interferon lambda fusion protein
  misc_feature (73)..(73): Xaa can be any naturally occurring amino acid
  misc_feature (307)..(307): Xaa can be any naturally occurring amino acid
MKLDMTGDCTPVLVLMAAVLTVTGAVPVARLHGALPDARGCHIAQFKSLSPQELQAFKRAKDALEESLLLKDXRCHSRLFPRTWDLRQLQVRERPMALEAELALTLKVLEATADTDPALVDVLDQPLHTLHHILSQFRACIQPQPTAGPRTRGRLHHWLYRLQEAPKKESPGCLEASVTFNLFRLLTRDLNCVASGDLCVGGGGSGGGGSGGGGSGGGGSMVPPPENVRMNSVNFKNILQWESPAFAKGNLTFTAQYLSYRIFQDKCMNTTLTECDFSSLSKYGDHTLRVRAEFADEHSDWVNITFXPVDDTIIGPPGMQVEVLADSLHMRFLAPKIENEYETWTMKNVYNSWTYNVQYWKNGTDEKFQITPQYDFEVLRNLEPWTTYCVQVRGFLPDRNKAGEWSEPVCEQTTHDETVPS

SEQ ID NO: 86 - protein, 421 aa, Artificial
  interferon lambda fusion protein
  misc_feature (75)..(75): Xaa can be any naturally occurring amino acid
  misc_feature (307)..(307): Xaa can be any naturally occurring amino acid
MKLDMTGDCTPVLVLMAAVLTVTGAVPVARLHGALPDARGCHIAQFKSLSPQELQAFKRAKDALEESLLLKDCRXHSRLFPRTWDLRQLQVRERPMALEAELALTLKVLEATADTDPALVDVLDQPLHTLHHILSQFRACIQPQPTAGPRTRGRLHHWLYRLQEAPKKESPGCLEASVTFNLFRLLTRDLNCVASGDLCVGGGGSGGGGSGGGGSGGGGSMVPPPENVRMNSVNFKNILQWESPAFAKGNLTFTAQYLSYRIFQDKCMNTTLTECDFSSLSKYGDHTLRVRAEFADEHSDWVNITFXPVDDTIIGPPGMQVEVLADSLHMRFLAPKIENEYETWTMKNVYNSWTYNVQYWKNGTDEKFQITPQYDFEVLRNLEPWTTYCVQVRGFLPDRNKAGEWSEPVCEQTTHDETVPS

SEQ ID NO: 87 - protein, 421 aa, Artificial
  interferon lambda fusion protein
  misc_feature (140)..(140): Xaa can be any naturally occurring amino acid
  misc_feature (307)..(307): Xaa can be any naturally occurring amino acid
MKLDMTGDCTPVLVLMAAVLTVTGAVPVARLHGALPDARGCHIAQFKSLSPQELQAFKRAKDALEESLLLKDCRCHSRLFPRTWDLRQLQVRERPMALEAELALTLKVLEATADTDPALVDVLDQPLHTLHHILSQFRAXIQPQPTAGPRTRGRLHHWLYRLQEAPKKESPGCLEASVTFNLFRLLTRDLNCVASGDLCVGGGGSGGGGSGGGGSGGGGSMVPPPENVRMNSVNFKNILQWESPAFAKGNLTFTAQYLSYRIFQDKCMNTTLTECDFSSLSKYGDHTLRVRAEFADEHSDWVNITFXPVDDTIIGPPGMQVEVLADSLHMRFLAPKIENEYETWTMKNVYNSWTYNVQYWKNGTDEKFQITPQYDFEVLRNLEPWTTYCVQVRGFLPDRNKAGEWSEPVCEQTTHDETVPS

SEQ ID NO: 88 - protein, 421 aa, Artificial
  interferon lambda fusion protein
  misc_feature (173)..(173): Xaa can be any naturally occurring amino acid
  misc_feature (307)..(307): Xaa can be any naturally occurring amino acid
MKLDMTGDCTPVLVLMAAVLTVTGAVPVARLHGALPDARGCHIAQFKSLSPQELQAFKRAKDALEESLLLKDCRCHSRLFPRTWDLRQLQVRERPMALEAELALTLKVLEATADTDPALVDVLDQPLHTLHHILSQFRACIQPQPTAGPRTRGRLHHWLYRLQEAPKKESPGXLEASVTFNLFRLLTRDLNCVASGDLCVGGGGSGGGGSGGGGSGGGGSMVPPPENVRMNSVNFKNILQWESPAFAKGNLTFTAQYLSYRIFQDKCMNTTLTECDFSSLSKYGDHTLRVRAEFADEHSDWVNITFXPVDDTIIGPPGMQVEVLADSLHMRFLAPKIENEYETWTMKNVYNSWTYNVQYWKNGTDEKFQITPQYDFEVLRNLEPWTTYCVQVRGFLPDRNKAGEWSEPVCEQTTHDETVPS

SEQ ID NO: 89 - protein, 421 aa, Artificial
  interferon lambda fusion protein
  misc_feature (192)..(192): Xaa can be any naturally occurring amino acid
  misc_feature (307)..(307): Xaa can be any naturally occurring amino acid
MKLDMTGDCTPVLVLMAAVLTVTGAVPVARLHGALPDARGCHIAQFKSLSPQELQAFKRAKDALEESLLLKDCRCHSRLFPRTWDLRQLQVRERPMALEAELALTLKVLEATADTDPALVDVLDQPLHTLHHILSQFRACIQPQPTAGPRTRGRLHHWLYRLQEAPKKESPGCLEASVTFNLFRLLTRDLNXVASGDLCVGGGGSGGGGSGGGGSGGGGSMVPPPENVRMNSVNFKNILQWESPAFAKGNLTFTAQYLSYRIFQDKCMNTTLTECDFSSLSKYGDHTLRVRAEFADEHSDWVNITFXPVDDTIIGPPGMQVEVLADSLHMRFLAPKIENEYETWTMKNVYNSWTYNVQYWKNGTDEKFQITPQYDFEVLRNLEPWTTYCVQVRGFLPDRNKAGEWSEPVCEQTTHDETVPS

SEQ ID NO: 90 - protein, 421 aa, Artificial
  interferon lambda fusion protein
  misc_feature (199)..(199): Xaa can be any naturally occurring amino acid
  misc_feature (307)..(307): Xaa can be any naturally occurring amino acid
MKLDMTGDCTPVLVLMAAVLTVTGAVPVARLHGALPDARGCHIAQFKSLSPQELQAFKRAKDALEESLLLKDCRCHSRLFPRTWDLRQLQVRERPMALEAELALTLKVLEATADTDPALVDVLDQPLHTLHHILSQFRACIQPQPTAGPRTRGRLHHWLYRLQEAPKKESPGCLEASVTFNLFRLLTRDLNCVASGDLXVGGGGSGGGGSGGGGSGGGGSMVPPPENVRMNSVNFKNILQWESPAFAKGNLTFTAQYLSYRIFQDKCMNTTLTECDFSSLSKYGDHTLRVRAEFADEHSDWVNITFXPVDDTIIGPPGMQVEVLADSLHMRFLAPKIENEYETWTMKNVYNSWTYNVQYWKNGTDEKFQITPQYDFEVLRNLEPWTTYCVQVRGFLPDRNKAGEWSEPVCEQTTHDETVPS

SEQ ID NO: 91 - protein, 423 aa, Artificial
  interferon lambda fusion protein
MAGPERWGPLLLCLLQAAPGRPRLAPPQNVTLLSQNFSVYLTWLPGLGNPQDVTYFVAYQSSPTRRRWREVEECAGTKELLCSMMCLKKQDLYNKFKGRVRTVSPSSKSPWVESEYLDYLFEVEPAPPVLVLTQTEEILSANATYQLPPCMPPLDLKYEVAFWKEGAGNKTLFPVTPHGQPVQITLQPAASEHHCLSARTIYTFSVPKYSKFSKPTCFLLEVPEANWAGGGGSGGGGSGGGGSGGGGSVPVARLHGALPDARGCHIAQFKSLSPQELQAFKRAKDALEESLLLKDCRCHSRLFPRTWDLRQLQVRERPMALEAELALTLKVLEATADTDPALVDVLDQPLHTLHHILSQFRACIQPQPTAGPRTRGRLHHWLYRLQEAPKKESPGCLEASVTFNLFRLLTRDLNCVASGDLCV

SEQ ID NO: 92 - protein, 423 aa, Artificial
  interferon lambda fusion protein
  misc_feature (264)..(264): Xaa can be any naturally occurring amino acid
MAGPERWGPLLLCLLQAAPGRPRLAPPQNVTLLSQNFSVYLTWLPGLGNPQDVTYFVAYQSSPTRRRWREVEECAGTKELLCSMMCLKKQDLYNKFKGRVRTVSPSSKSPWVESEYLDYLFEVEPAPPVLVLTQTEEILSANATYQLPPCMPPLDLKYEVAFWKEGAGNKTLFPVTPHGQPVQITLQPAASEHHCLSARTIYTFSVPKYSKFSKPTCFLLEVPEANWAGGGGSGGGGSGGGGSGGGGSVPVARLHGALPDARGXHIAQFKSLSPQELQAFKRAKDALEESLLLKDCRCHSRLFPRTWDLRQLQVRERPMALEAELALTLKVLEATADTDPALVDVLDQPLHTLHHILSQFRACIQPQPTAGPRTRGRLHHWLYRLQEAPKKESPGCLEASVTFNLFRLLTRDLNCVASGDLCV

SEQ ID NO: 93 - protein, 423 aa, Artificial
  interferon lambda fusion protein
  misc_feature (296)..(296): Xaa can be any naturally occurring amino acid
MAGPERWGPLLLCLLQAAPGRPRLAPPQNVTLLSQNFSVYLTWLPGLGNPQDVTYFVAYQSSPTRRRWREVEECAGTKELLCSMMCLKKQDLYNKFKGRVRTVSPSSKSPWVESEYLDYLFEVEPAPPVLVLTQTEEILSANATYQLPPCMPPLDLKYEVAFWKEGAGNKTLFPVTPHGQPVQITLQPAASEHHCLSARTIYTFSVPKYSKFSKPTCFLLEVPEANWAGGGGSGGGGSGGGGSGGGGSVPVARLHGALPDARGCHIAQFKSLSPQELQAFKRAKDALEESLLLKDXRCHSRLFPRTWDLRQLQVRERPMALEAELALTLKVLEATADTDPALVDVLDQPLHTLHHILSQFRACIQPQPTAGPRTRGRLHHWLYRLQEAPKKESPGCLEASVTFNLFRLLTRDLNCVASGDLCV

SEQ ID NO: 94 - protein, 423 aa, Artificial
  interferon lambda fusion protein
  misc_feature (298)..(298): Xaa can be any naturally occurring amino acid
MAGPERWGPLLLCLLQAAPGRPRLAPPQNVTLLSQNFSVYLTWLPGLGNPQDVTYFVAYQSSPTRRRWREVEECAGTKELLCSMMCLKKQDLYNKFKGRVRTVSPSSKSPWVESEYLDYLFEVEPAPPVLVLTQTEEILSANATYQLPPCMPPLDLKYEVAFWKEGAGNKTLFPVTPHGQPVQITLQPAASEHHCLSARTIYTFSVPKYSKFSKPTCFLLEVPEANWAGGGGSGGGGSGGGGSGGGGSVPVARLHGALPDARGCHIAQFKSLSPQELQAFKRAKDALEESLLLKDCRXHSRLFPRTWDLRQLQVRERPMALEAELALTLKVLEATADTDPALVDVLDQPLHTLHHILSQFRACIQPQPTAGPRTRGRLHHWLYRLQEAPKKESPGCLEASVTFNLFRLLTRDLNCVASGDLCV

SEQ ID NO: 95 - protein, 423 aa, Artificial
  interferon lambda fusion protein
  misc_feature (363)..(363): Xaa can be any naturally occurring amino acid
MAGPERWGPLLLCLLQAAPGRPRLAPPQNVTLLSQNFSVYLTWLPGLGNPQDVTYFVAYQSSPTRRRWREVEECAGTKELLCSMMCLKKQDLYNKFKGRVRTVSPSSKSPWVESEYLDYLFEVEPAPPVLVLTQTEEILSANATYQLPPCMPPLDLKYEVAFWKEGAGNKTLFPVTPHGQPVQITLQPAASEHHCLSARTIYTFSVPKYSKFSKPTCFLLEVPEANWAGGGGSGGGGSGGGGSGGGGSVPVARLHGALPDARGCHIAQFKSLSPQELQAFKRAKDALEESLLLKDCRCHSRLFPRTWDLRQLQVRERPMALEAELALTLKVLEATADTDPALVDVLDQPLHTLHHILSQFRAXIQPQPTAGPRTRGRLHHWLYRLQEAPKKESPGCLEASVTFNLFRLLTRDLNCVASGDLCV

SEQ ID NO: 96 - protein, 423 aa, Artificial
  interferon lambda fusion protein
  misc_feature (396)..(396): Xaa can be any naturally occurring amino acid
MAGPERWGPLLLCLLQAAPGRPRLAPPQNVTLLSQNFSVYLTWLPGLGNPQDVTYFVAYQSSPTRRRWREVEECAGTKELLCSMMCLKKQDLYNKFKGRVRTVSPSSKSPWVESEYLDYLFEVEPAPPVLVLTQTEEILSANATYQLPPCMPPLDLKYEVAFWKEGAGNKTLFPVTPHGQPVQITLQPAASEHHCLSARTIYTFSVPKYSKFSKPTCFLLEVPEANWAGGGGSGGGGSGGGGSGGGGSVPVARLHGALPDARGCHIAQFKSLSPQELQAFKRAKDALEESLLLKDCRCHSRLFPRTWDLRQLQVRERPMALEAELALTLKVLEATADTDPALVDVLDQPLHTLHHILSQFRACIQPQPTAGPRTRGRLHHWLYRLQEAPKKESPGXLEASVTFNLFRLLTRDLNCVASGDLCV

SEQ ID NO: 97 - protein, 423 aa, Artificial
  interferon lambda fusion protein
  misc_feature (415)..(415): Xaa can be any naturally occurring amino acid
MAGPERWGPLLLCLLQAAPGRPRLAPPQNVTLLSQNFSVYLTWLPGLGNPQDVTYFVAYQSSPTRRRWREVEECAGTKELLCSMMCLKKQDLYNKFKGRVRTVSPSSKSPWVESEYLDYLFEVEPAPPVLVLTQTEEILSANATYQLPPCMPPLDLKYEVAFWKEGAGNKTLFPVTPHGQPVQITLQPAASEHHCLSARTIYTFSVPKYSKFSKPTCFLLEVPEANWAGGGGSGGGGSGGGGSGGGGSVPVARLHGALPDARGCHIAQFKSLSPQELQAFKRAKDALEESLLLKDCRCHSRLFPRTWDLRQLQVRERPMALEAELALTLKVLEATADTDPALVDVLDQPLHTLHHILSQFRACIQPQPTAGPRTRGRLHHWLYRLQEAPKKESPGCLEASVTFNLFRLLTRDLNXVASGDLCV

SEQ ID NO: 98 - protein, 423 aa, Artificial
  interferon lambda fusion protein
  misc_feature (422)..(422): Xaa can be any naturally occurring amino acid
MAGPERWGPLLLCLLQAAPGRPRLAPPQNVTLLSQNFSVYLTWLPGLGNPQDVTYFVAYQSSPTRRRWREVEECAGTKELLCSMMCLKKQDLYNKFKGRVRTVSPSSKSPWVESEYLDYLFEVEPAPPVLVLTQTEEILSANATYQLPPCMPPLDLKYEVAFWKEGAGNKTLFPVTPHGQPVQITLQPAASEHHCLSARTIYTFSVPKYSKFSKPTCFLLEVPEANWAGGGGSGGGGSGGGGSGGGGSVPVARLHGALPDARGCHIAQFKSLSPQELQAFKRAKDALEESLLLKDCRCHSRLFPRTWDLRQLQVRERPMALEAELALTLKVLEATADTDPALVDVLDQPLHTLHHILSQFRACIQPQPTAGPRTRGRLHHWLYRLQEAPKKESPGCLEASVTFNLFRLLTRDLNCVASGDLXV

SEQ ID NO: 99 - protein, 423 aa, Artificial
  interferon lambda fusion protein
  misc_feature (86)..(86): Xaa can be any naturally occurring amino acid
  misc_feature (150)..(150): Xaa can be any naturally occurring amino acid
MAGPERWGPLLLCLLQAAPGRPRLAPPQNVTLLSQNFSVYLTWLPGLGNPQDVTYFVAYQSSPTRRRWREVEECAGTKELLCSMMXLKKQDLYNKFKGRVRTVSPSSKSPWVESEYLDYLFEVEPAPPVLVLTQTEEILSANATYQLPPXMPPLDLKYEVAFWKEGAGNKTLFPVTPHGQPVQITLQPAASEHHCLSARTIYTFSVPKYSKFSKPTCFLLEVPEANWAGGGGSGGGGSGGGGSGGGGSVPVARLHGALPDARGCHIAQFKSLSPQELQAFKRAKDALEESLLLKDCRCHSRLFPRTWDLRQLQVRERPMALEAELALTLKVLEATADTDPALVDVLDQPLHTLHHILSQFRACIQPQPTAGPRTRGRLHHWLYRLQEAPKKESPGCLEASVTFNLFRLLTRDLNCVASGDLCV

SEQ ID NO: 100 - protein, 423 aa, Artificial
  interferon lambda fusion protein
  misc_feature (86)..(86): Xaa can be any naturally occurring amino acid
  misc_feature (150)..(150): Xaa can be any naturally occurring amino acid
  misc_feature (264)..(264): Xaa can be any naturally occurring amino acid
MAGPERWGPLLLCLLQAAPGRPRLAPPQNVTLLSQNFSVYLTWLPGLGNPQDVTYFVAYQSSPTRRRWREVEECAGTKELLCSMMXLKKQDLYNKFKGRVRTVSPSSKSPWVESEYLDYLFEVEPAPPVLVLTQTEEILSANATYQLPPXMPPLDLKYEVAFWKEGAGNKTLFPVTPHGQPVQITLQPAASEHHCLSARTIYTFSVPKYSKFSKPTCFLLEVPEANWAGGGGSGGGGSGGGGSGGGGSVPVARLHGALPDARGXHIAQFKSLSPQELQAFKRAKDALEESLLLKDCRCHSRLFPRTWDLRQLQVRERPMALEAELALTLKVLEATADTDPALVDVLDQPLHTLHHILSQFRACIQPQPTAGPRTRGRLHHWLYRLQEAPKKESPGCLEASVTFNLFRLLTRDLNCVASGDLCV

SEQ ID NO: 101 - protein, 423 aa, Artificial
  interferon lambda fusion protein
  misc_feature (86)..(86): Xaa can be any naturally occurring amino acid
  misc_feature (150)..(150): Xaa can be any naturally occurring amino acid
  misc_feature (296)..(296): Xaa can be any naturally occurring amino acid
MAGPERWGPLLLCLLQAAPGRPRLAPPQNVTLLSQNFSVYLTWLPGLGNPQDVTYFVAYQSSPTRRRWREVEECAGTKELLCSMMXLKKQDLYNKFKGRVRTVSPSSKSPWVESEYLDYLFEVEPAPPVLVLTQTEEILSANATYQLPPXMPPLDLKYEVAFWKEGAGNKTLFPVTPHGQPVQITLQPAASEHHCLSARTIYTFSVPKYSKFSKPTCFLLEVPEANWAGGGGSGGGGSGGGGSGGGGSVPVARLHGALPDARGCHIAQFKSLSPQELQAFKRAKDALEESLLLKDXRCHSRLFPRTWDLRQLQVRERPMALEAELALTLKVLEATADTDPALVDVLDQPLHTLHHILSQFRACIQPQPTAGPRTRGRLHHWLYRLQEAPKKESPGCLEASVTFNLFRLLTRDLNCVASGDLCV

SEQ ID NO: 102 - protein, 423 aa, Artificial
  interferon lambda fusion protein
  misc_feature (86)..(86): Xaa can be any naturally occurring amino acid
  misc_feature (150)..(150): Xaa can be any naturally occurring amino acid
  misc_feature (298)..(298): Xaa can be any naturally occurring amino acid
MAGPERWGPLLLCLLQAAPGRPRLAPPQNVTLLSQNFSVYLTWLPGLGNPQDVTYFVAYQSSPTRRRWREVEECAGTKELLCSMMXLKKQDLYNKFKGRVRTVSPSSKSPWVESEYLDYLFEVEPAPPVLVLTQTEEILSANATYQLPPXMPPLDLKYEVAFWKEGAGNKTLFPVTPHGQPVQITLQPAASEHHCLSARTIYTFSVPKYSKFSKPTCFLLEVPEANWAGGGGSGGGGSGGGGSGGGGSVPVARLHGALPDARGCHIAQFKSLSPQELQAFKRAKDALEESLLLKDCRXHSRLFPRTWDLRQLQVRERPMALEAELALTLKVLEATADTDPALVDVLDQPLHTLHHILSQFRACIQPQPTAGPRTRGRLHHWLYRLQEAPKKESPGCLEASVTFNLFRLLTRDLNCVASGDLCV

SEQ ID NO: 103 - protein, 423 aa, Artificial
  interferon lambda fusion protein
  misc_feature (86)..(86): Xaa can be any naturally occurring amino acid
  misc_feature (150)..(150): Xaa can be any naturally occurring amino acid
  misc_feature (363)..(363): Xaa can be any naturally occurring amino acid
MAGPERWGPLLLCLLQAAPGRPRLAPPQNVTLLSQNFSVYLTWLPGLGNPQDVTYFVAYQSSPTRRRWREVEECAGTKELLCSMMXLKKQDLYNKFKGRVRTVSPSSKSPWVESEYLDYLFEVEPAPPVLVLTQTEEILSANATYQLPPXMPPLDLKYEVAFWKEGAGNKTLFPVTPHGQPVQITLQPAASEHHCLSARTIYTFSVPKYSKFSKPTCFLLEVPEANWAGGGGSGGGGSGGGGSGGGGSVPVARLHGALPDARGCHIAQFKSLSPQELQAFKRAKDALEESLLLKDCRCHSRLFPRTWDLRQLQVRERPMALEAELALTLKVLEATADTDPALVDVLDQPLHTLHHILSQFRAXIQPQPTAGPRTRGRLHHWLYRLQEAPKKESPGCLEASVTFNLFRLLTRDLNCVASGDLCV

SEQ ID NO: 104 - protein, 423 aa, Artificial
  interferon lambda fusion protein
  misc_feature (86)..(86): Xaa can be any naturally occurring amino acid
  misc_feature (150)..(150): Xaa can be any naturally occurring amino acid
  misc_feature (396)..(396): Xaa can be any naturally occurring amino acid
MAGPERWGPLLLCLLQAAPGRPRLAPPQNVTLLSQNFSVYLTWLPGLGNPQDVTYFVAYQSSPTRRRWREVEECAGTKELLCSMMXLKKQDLYNKFKGRVRTVSPSSKSPWVESEYLDYLFEVEPAPPVLVLTQTEEILSANATYQLPPXMPPLDLKYEVAFWKEGAGNKTLFPVTPHGQPVQITLQPAASEHHCLSARTIYTFSVPKYSKFSKPTCFLLEVPEANWAGGGGSGGGGSGGGGSGGGGSVPVARLHGALPDARGCHIAQFKSLSPQELQAFKRAKDALEESLLLKDCRCHSRLFPRTWDLRQLQVRERPMALEAELALTLKVLEATADTDPALVDVLDQPLHTLHHILSQFRACIQPQPTAGPRTRGRLHHWLYRLQEAPKKESPGXLEASVTFNLFRLLTRDLNCVASGDLCV

SEQ ID NO: 105 - protein, 423 aa, Artificial
  interferon lambda fusion protein
  misc_feature (86)..(86): Xaa can be any naturally occurring amino acid
  misc_feature (150)..(150): Xaa can be any naturally occurring amino acid
  misc_feature (422)..(422): Xaa can be any naturally occurring amino acid
MAGPERWGPLLLCLLQAAPGRPRLAPPQNVTLLSQNFSVYLTWLPGLGNPQDVTYFVAYQSSPTRRRWREVEECAGTKELLCSMMXLKKQDLYNKFKGRVRTVSPSSKSPWVESEYLDYLFEVEPAPPVLVLTQTEEILSANATYQLPPXMPPLDLKYEVAFWKEGAGNKTLFPVTPHGQPVQITLQPAASEHHCLSARTIYTFSVPKYSKFSKPTCFLLEVPEANWAGGGGSGGGGSGGGGSGGGGSVPVARLHGALPDARGCHIAQFKSLSPQELQAFKRAKDALEESLLLKDCRCHSRLFPRTWDLRQLQVRERPMALEAELALTLKVLEATADTDPALVDVLDQPLHTLHHILSQFRACIQPQPTAGPRTRGRLHHWLYRLQEAPKKESPGCLEASVTFNLFRLLTRDLNCVASGDLXV

SEQ ID NO: 106 - protein, 420 aa, Artificial
  interferon lambda fusion protein
MAWSLGSWLGGCLLVSALGMVPPPENVRMNSVNFKNILQWESPAFAKGNLTFTAQYLSYRIFQDKCMNTTLTECDFSSLSKYGDHTLRVRAEFADEHSDWVNITFCPVDDTIIGPPGMQVEVLADSLHMRFLAPKIENEYETWTMKNVYNSWTYNVQYWKNGTDEKFQITPQYDFEVLRNLEPWTTYCVQVRGFLPDRNKAGEWSEPVCEQTTHDETVPSGGGGSGGGGSGGGGSGGGGSGGGGSVPVARLHGALPDARGCHIAQFKSLSPQELQAFKRAKDALEESLLLKDCRCHSRLFPRTWDLRQLQVRERPMALEAELALTLKVLEATADTDPALVDVLDQPLHTLHHILSQFRACIQPQPTAGPRTRGRLHHWLYRLQEAPKKESPGCLEASVTFNLFRLLTRDLNCVASGDLCV

SEQ ID NO: 107 - protein, 420 aa, Artificial
  interferon lambda fusion protein
  misc_feature (261)..(261): Xaa can be any naturally occurring amino acid
MAWSLGSWLGGCLLVSALGMVPPPENVRMNSVNFKNILQWESPAFAKGNLTFTAQYLSYRIFQDKCMNTTLTECDFSSLSKYGDHTLRVRAEFADEHSDWVNITFCPVDDTIIGPPGMQVEVLADSLHMRFLAPKIENEYETWTMKNVYNSWTYNVQYWKNGTDEKFQITPQYDFEVLRNLEPWTTYCVQVRGFLPDRNKAGEWSEPVCEQTTHDETVPSGGGGSGGGGSGGGGSGGGGSGGGGSVPVARLHGALPDARGXHIAQFKSLSPQELQAFKRAKDALEESLLLKDCRCHSRLFPRTWDLRQLQVRERPMALEAELALTLKVLEATADTDPALVDVLDQPLHTLHHILSQFRACIQPQPTAGPRTRGRLHHWLYRLQEAPKKESPGCLEASVTFNLFRLLTRDLNCVASGDLCV

SEQ ID NO: 108 - protein, 420 aa, Artificial
  interferon lambda fusion protein
  misc_feature (293)..(293): Xaa can be any naturally occurring amino acid
MAWSLGSWLGGCLLVSALGMVPPPENVRMNSVNFKNILQWESPAFAKGNLTFTAQYLSYRIFQDKCMNTTLTECDFSSLSKYGDHTLRVRAEFADEHSDWVNITFCPVDDTIIGPPGMQVEVLADSLHMRFLAPKIENEYETWTMKNVYNSWTYNVQYWKNGTDEKFQITPQYDFEVLRNLEPWTTYCVQVRGFLPDRNKAGEWSEPVCEQTTHDETVPSGGGGSGGGGSGGGGSGGGGSGGGGSVPVARLHGALPDARGCHIAQFKSLSPQELQAFKRAKDALEESLLLKDXRCHSRLFPRTWDLRQLQVRERPMALEAELALTLKVLEATADTDPALVDVLDQPLHTLHHILSQFRACIQPQPTAGPRTRGRLHHWLYRLQEAPKKESPGCLEASVTFNLFRLLTRDLNCVASGDLCV

SEQ ID NO: 109 - protein, 420 aa, Artificial
  interferon lambda fusion protein
  misc_feature (295)..(295): Xaa can be any naturally occurring amino acid
MAWSLGSWLGGCLLVSALGMVPPPENVRMNSVNFKNILQWESPAFAKGNLTFTAQYLSYRIFQDKCMNTTLTECDFSSLSKYGDHTLRVRAEFADEHSDWVNITFCPVDDTIIGPPGMQVEVLADSLHMRFLAPKIENEYETWTMKNVYNSWTYNVQYWKNGTDEKFQITPQYDFEVLRNLEPWTTYCVQVRGFLPDRNKAGEWSEPVCEQTTHDETVPSGGGGSGGGGSGGGGSGGGGSGGGGSVPVARLHGALPDARGCHIAQFKSLSPQELQAFKRAKDALEESLLLKDCRXHSRLFPRTWDLRQLQVRERPMALEAELALTLKVLEATADTDPALVDVLDQPLHTLHHILSQFRACIQPQPTAGPRTRGRLHHWLYRLQEAPKKESPGCLEASVTFNLFRLLTRDLNCVASGDLCV

SEQ ID NO: 110 - protein, 420 aa, Artificial
  interferon lambda fusion protein
  misc_feature (360)..(360): Xaa can be any naturally occurring amino acid
MAWSLGSWLGGCLLVSALGMVPPPENVRMNSVNFKNILQWESPAFAKGNLTFTAQYLSYRIFQDKCMNTTLTECDFSSLSKYGDHTLRVRAEFADEHSDWVNITFCPVDDTIIGPPGMQVEVLADSLHMRFLAPKIENEYETWTMKNVYNSWTYNVQYWKNGTDEKFQITPQYDFEVLRNLEPWTTYCVQVRGFLPDRNKAGEWSEPVCEQTTHDETVPSGGGGSGGGGSGGGGSGGGGSGGGGSVPVARLHGALPDARGCHIAQFKSLSPQELQAFKRAKDALEESLLLKDCRCHSRLFPRTWDLRQLQVRERPMALEAELALTLKVLEATADTDPALVDVLDQPLHTLHHILSQFRAXIQPQPTAGPRTRGRLHHWLYRLQEAPKKESPGCLEASVTFNLFRLLTRDLNCVASGDLCV

SEQ ID NO: 111 - protein, 420 aa, Artificial
  interferon lambda fusion protein
  misc_feature (393)..(393): Xaa can be any naturally occurring amino acid
MAWSLGSWLGGCLLVSALGMVPPPENVRMNSVNFKNILQWESPAFAKGNLTFTAQYLSYRIFQDKCMNTTLTECDFSSLSKYGDHTLRVRAEFADEHSDWVNITFCPVDDTIIGPPGMQVEVLADSLHMRFLAPKIENEYETWTMKNVYNSWTYNVQYWKNGTDEKFQITPQYDFEVLRNLEPWTTYCVQVRGFLPDRNKAGEWSEPVCEQTTHDETVPSGGGGSGGGGSGGGGSGGGGSGGGGSVPVARLHGALPDARGCHIAQFKSLSPQELQAFKRAKDALEESLLLKDCRCHSRLFPRTWDLRQLQVRERPMALEAELALTLKVLEATADTDPALVDVLDQPLHTLHHILSQFRACIQPQPTAGPRTRGRLHHWLYRLQEAPKKESPGXLEASVTFNLFRLLTRDLNCVASGDLCV

SEQ ID NO: 112 - protein, 420 aa, Artificial
  interferon lambda fusion protein
  misc_feature (412)..(412): Xaa can be any naturally occurring amino acid
MAWSLGSWLGGCLLVSALGMVPPPENVRMNSVNFKNILQWESPAFAKGNLTFTAQYLSYRIFQDKCMNTTLTECDFSSLSKYGDHTLRVRAEFADEHSDWVNITFCPVDDTIIGPPGMQVEVLADSLHMRFLAPKIENEYETWTMKNVYNSWTYNVQYWKNGTDEKFQITPQYDFEVLRNLEPWTTYCVQVRGFLPDRNKAGEWSEPVCEQTTHDETVPSGGGGSGGGGSGGGGSGGGGSGGGGSVPVARLHGALPDARGCHIAQFKSLSPQELQAFKRAKDALEESLLLKDCRCHSRLFPRTWDLRQLQVRERPMALEAELALTLKVLEATADTDPALVDVLDQPLHTLHHILSQFRACIQPQPTAGPRTRGRLHHWLYRLQEAPKKESPGCLEASVTFNLFRLLTRDLNXVASGDLCV

SEQ ID NO: 113 - protein, 420 aa, Artificial
  interferon lambda fusion protein
  misc_feature (106)..(106): Xaa can be any naturally occurring amino acid
  misc_feature (419)..(419): Xaa can be any naturally occurring amino acid
MAWSLGSWLGGCLLVSALGMVPPPENVRMNSVNFKNILQWESPAFAKGNLTFTAQYLSYRIFQDKCMNTTLTECDFSSLSKYGDHTLRVRAEFADEHSDWVNITFXPVDDTIIGPPGMQVEVLADSLHMRFLAPKIENEYETWTMKNVYNSWTYNVQYWKNGTDEKFQITPQYDFEVLRNLEPWTTYCVQVRGFLPDRNKAGEWSEPVCEQTTHDETVPSGGGGSGGGGSGGGGSGGGGSGGGGSVPVARLHGALPDARGCHIAQFKSLSPQELQAFKRAKDALEESLLLKDCRCHSRLFPRTWDLRQLQVRERPMALEAELALTLKVLEATADTDPALVDVLDQPLHTLHHILSQFRACIQPQPTAGPRTRGRLHHWLYRLQEAPKKESPGCLEASVTFNLFRLLTRDLNCVASGDLXV

SEQ ID NO: 114 - protein, 420 aa, Artificial
  interferon lambda fusion  protein
  misc_feature (106)..(106): Xaa can be any naturally occurring amino acid
MAWSLGSWLGGCLLVSALGMVPPPENVRMNSVNFKNILQWESPAFAKGNLTFTAQYLSYRIFQDKCMNTTLTECDFSSLSKYGDHTLRVRAEFADEHSDWVNITFXPVDDTIIGPPGMQVEVLADSLHMRFLAPKIENEYETWTMKNVYNSWTYNVQYWKNGTDEKFQITPQYDFEVLRNLEPWTTYCVQVRGFLPDRNKAGEWSEPVCEQTTHDETVPSGGGGSGGGGSGGGGSGGGGSGGGGSVPVARLHGALPDARGCHIAQFKSLSPQELQAFKRAKDALEESLLLKDCRCHSRLFPRTWDLRQLQVRERPMALEAELALTLKVLEATADTDPALVDVLDQPLHTLHHILSQFRACIQPQPTAGPRTRGRLHHWLYRLQEAPKKESPGCLEASVTFNLFRLLTRDLNCVASGDLCV

SEQ ID NO: 115 - protein, 420 aa, Artificial
  interferon lambda fusion protein
  misc_feature (106)..(106): Xaa can be any naturally occurring amino acid
  misc_feature (261)..(261): Xaa can be any naturally occurring amino acid
MAWSLGSWLGGCLLVSALGMVPPPENVRMNSVNFKNILQWESPAFAKGNLTFTAQYLSYRIFQDKCMNTTLTECDFSSLSKYGDHTLRVRAEFADEHSDWVNITFXPVDDTIIGPPGMQVEVLADSLHMRFLAPKIENEYETWTMKNVYNSWTYNVQYWKNGTDEKFQITPQYDFEVLRNLEPWTTYCVQVRGFLPDRNKAGEWSEPVCEQTTHDETVPSGGGGSGGGGSGGGGSGGGGSGGGGSVPVARLHGALPDARGXHIAQFKSLSPQELQAFKRAKDALEESLLLKDCRCHSRLFPRTWDLRQLQVRERPMALEAELALTLKVLEATADTDPALVDVLDQPLHTLHHILSQFRACIQPQPTAGPRTRGRLHHWLYRLQEAPKKESPGCLEASVTFNLFRLLTRDLNCVASGDLCV

SEQ ID NO: 116 - protein, 420 aa, Artificial
  interferon lambda fusion protein
  misc_feature (106)..(106): Xaa can be any naturally occurring amino acid
  misc_feature (293)..(293): Xaa can be any naturally occurring amino acid
MAWSLGSWLGGCLLVSALGMVPPPENVRMNSVNFKNILQWESPAFAKGNLTFTAQYLSYRIFQDKCMNTTLTECDFSSLSKYGDHTLRVRAEFADEHSDWVNITFXPVDDTIIGPPGMQVEVLADSLHMRFLAPKIENEYETWTMKNVYNSWTYNVQYWKNGTDEKFQITPQYDFEVLRNLEPWTTYCVQVRGFLPDRNKAGEWSEPVCEQTTHDETVPSGGGGSGGGGSGGGGSGGGGSGGGGSVPVARLHGALPDARGCHIAQFKSLSPQELQAFKRAKDALEESLLLKDXRCHSRLFPRTWDLRQLQVRERPMALEAELALTLKVLEATADTDPALVDVLDQPLHTLHHILSQFRACIQPQPTAGPRTRGRLHHWLYRLQEAPKKESPGCLEASVTFNLFRLLTRDLNCVASGDLCV

SEQ ID NO: 117 - protein, 420 aa, Artificial
  interferon lambda fusion protein
  misc_feature (106)..(106): Xaa can be any naturally occurring amino acid
  misc_feature (295)..(295): Xaa can be any naturally occurring amino acid
MAWSLGSWLGGCLLVSALGMVPPPENVRMNSVNFKNILQWESPAFAKGNLTFTAQYLSYRIFQDKCMNTTLTECDFSSLSKYGDHTLRVRAEFADEHSDWVNITFXPVDDTIIGPPGMQVEVLADSLHMRFLAPKIENEYETWTMKNVYNSWTYNVQYWKNGTDEKFQITPQYDFEVLRNLEPWTTYCVQVRGFLPDRNKAGEWSEPVCEQTTHDETVPSGGGGSGGGGSGGGGSGGGGSGGGGSVPVARLHGALPDARGCHIAQFKSLSPQELQAFKRAKDALEESLLLKDCRXHSRLFPRTWDLRQLQVRERPMALEAELALTLKVLEATADTDPALVDVLDQPLHTLHHILSQFRACIQPQPTAGPRTRGRLHHWLYRLQEAPKKESPGCLEASVTFNLFRLLTRDLNCVASGDLCV

SEQ ID NO: 118 - protein, 420 aa, Artificial
  interferon lambda fusion protein
  misc_feature (106)..(106): Xaa can be any naturally occurring amino acid
  misc_feature (360)..(360): Xaa can be any naturally occurring amino acid
MAWSLGSWLGGCLLVSALGMVPPPENVRMNSVNFKNILQWESPAFAKGNLTFTAQYLSYRIFQDKCMNTTLTECDFSSLSKYGDHTLRVRAEFADEHSDWVNITFXPVDDTIIGPPGMQVEVLADSLHMRFLAPKIENEYETWTMKNVYNSWTYNVQYWKNGTDEKFQITPQYDFEVLRNLEPWTTYCVQVRGFLPDRNKAGEWSEPVCEQTTHDETVPSGGGGSGGGGSGGGGSGGGGSGGGGSVPVARLHGALPDARGCHIAQFKSLSPQELQAFKRAKDALEESLLLKDCRCHSRLFPRTWDLRQLQVRERPMALEAELALTLKVLEATADTDPALVDVLDQPLHTLHHILSQFRAXIQPQPTAGPRTRGRLHHWLYRLQEAPKKESPGCLEASVTFNLFRLLTRDLNCVASGDLCV

SEQ ID NO: 119 - protein, 420 aa, Artificial
  interferon lambda fusion protein
  misc_feature (106)..(106): Xaa can be any naturally occurring amino acid
  misc_feature (393)..(393): Xaa can be any naturally occurring amino acid
MAWSLGSWLGGCLLVSALGMVPPPENVRMNSVNFKNILQWESPAFAKGNLTFTAQYLSYRIFQDKCMNTTLTECDFSSLSKYGDHTLRVRAEFADEHSDWVNITFXPVDDTIIGPPGMQVEVLADSLHMRFLAPKIENEYETWTMKNVYNSWTYNVQYWKNGTDEKFQITPQYDFEVLRNLEPWTTYCVQVRGFLPDRNKAGEWSEPVCEQTTHDETVPSGGGGSGGGGSGGGGSGGGGSGGGGSVPVARLHGALPDARGCHIAQFKSLSPQELQAFKRAKDALEESLLLKDCRCHSRLFPRTWDLRQLQVRERPMALEAELALTLKVLEATADTDPALVDVLDQPLHTLHHILSQFRACIQPQPTAGPRTRGRLHHWLYRLQEAPKKESPGXLEASVTFNLFRLLTRDLNCVASGDLCV

SEQ ID NO: 120 - protein, 420 aa, Artificial
  interferon lambda fusion protein
  misc_feature (106)..(106): Xaa can be any naturally occurring amino acid
  misc_feature (412)..(412): Xaa can be any naturally occurring amino acid
MAWSLGSWLGGCLLVSALGMVPPPENVRMNSVNFKNILQWESPAFAKGNLTFTAQYLSYRIFQDKCMNTTLTECDFSSLSKYGDHTLRVRAEFADEHSDWVNITFXPVDDTIIGPPGMQVEVLADSLHMRFLAPKIENEYETWTMKNVYNSWTYNVQYWKNGTDEKFQITPQYDFEVLRNLEPWTTYCVQVRGFLPDRNKAGEWSEPVCEQTTHDETVPSGGGGSGGGGSGGGGSGGGGSGGGGSVPVARLHGALPDARGCHIAQFKSLSPQELQAFKRAKDALEESLLLKDCRCHSRLFPRTWDLRQLQVRERPMALEAELALTLKVLEATADTDPALVDVLDQPLHTLHHILSQFRACIQPQPTAGPRTRGRLHHWLYRLQEAPKKESPGCLEASVTFNLFRLLTRDLNXVASGDLCV

SEQ ID NO: 121 - protein, 420 aa, Artificial; identical to SEQ ID NO: 113
  interferon lambda fusion protein
  misc_feature (106)..(106): Xaa can be any naturally occurring amino acid
  misc_feature (419)..(419): Xaa can be any naturally occurring amino acid

SEQ ID NO: 122 - protein, 433 aa, Artificial
  interferon lambda fusion protein
MKLDMTGDCMPVLVLMAAVLTVTGAVPVARLRGALPDARGCHIAQFKSLSPQELQAFKRAKDALEESLLLKDCKCRSRLFPRTWDLRQLQVRERPVALEAELALTLKVLEATADTDPALGDVLDQPLHTLHHILSQLRACIQPQPTAGPRTRGRLHHWLHRLQEAPKKESPGCLEASVTFNLFRLLTRDLNCVASGDLCVGGGGSGGGGSGGGGSGGGGSGGGGSRPRLAPPQNVTLLSQNFSVYLTWLPGLGNPQDVTYFVAYQSSPTRRRWREVEECAGTKELLCSMMCLKKQDLYNKFKGRVRTVSPSSKSPWVESEYLDYLFEVEPAPPVLVLTQTEEILSANATYQLPPCMPPLDLKYEVAFWKEGAGNKTLFPVTPHGQPVQITLQPAASEHHCLSARTIYTFSVPKYSKFSKPTCFLLEVPEANWA

SEQ ID NO: 123 - protein, 433 aa, Artificial
  interferon lambda fusion protein
  misc_feature (41)..(41): Xaa can be any naturally occurring amino acid
MKLDMTGDCMPVLVLMAAVLTVTGAVPVARLRGALPDARGXHIAQFKSLSPQELQAFKRAKDALEESLLLKDCKCRSRLFPRTWDLRQLQVRERPVALEAELALTLKVLEATADTDPALGDVLDQPLHTLHHILSQLRACIQPQPTAGPRTRGRLHHWLHRLQEAPKKESPGCLEASVTFNLFRLLTRDLNCVASGDLCVGGGGSGGGGSGGGGSGGGGSGGGGSRPRLAPPQNVTLLSQNFSVYLTWLPGLGNPQDVTYFVAYQSSPTRRRWREVEECAGTKELLCSMMCLKKQDLYNKFKGRVRTVSPSSKSPWVESEYLDYLFEVEPAPPVLVLTQTEEILSANATYQLPPCMPPLDLKYEVAFWKEGAGNKTLFPVTPHGQPVQITLQPAASEHHCLSARTIYTFSVPKYSKFSKPTCFLLEVPEANWA

SEQ ID NO: 124 - protein, 433 aa, Artificial
  interferon lambda fusion protein
  misc_feature (73)..(73): Xaa can be any naturally occurring amino acid
MKLDMTGDCMPVLVLMAAVLTVTGAVPVARLRGALPDARGCHIAQFKSLSPQELQAFKRAKDALEESLLLKDXKCRSRLFPRTWDLRQLQVRERPVALEAELALTLKVLEATADTDPALGDVLDQPLHTLHHILSQLRACIQPQPTAGPRTRGRLHHWLHRLQEAPKKESPGCLEASVTFNLFRLLTRDLNCVASGDLCVGGGGSGGGGSGGGGSGGGGSGGGGSRPRLAPPQNVTLLSQNFSVYLTWLPGLGNPQDVTYFVAYQSSPTRRRWREVEECAGTKELLCSMMCLKKQDLYNKFKGRVRTVSPSSKSPWVESEYLDYLFEVEPAPPVLVLTQTEEILSANATYQLPPCMPPLDLKYEVAFWKEGAGNKTLFPVTPHGQPVQITLQPAASEHHCLSARTIYTFSVPKYSKFSKPTCFLLEVPEANWA

SEQ ID NO: 125 - protein, 433 aa, Artificial
  interferon lambda fusion protein
  misc_feature (75)..(75): Xaa can be any naturally occurring amino acid
MKLDMTGDCMPVLVLMAAVLTVTGAVPVARLRGALPDARGCHIAQFKSLSPQELQAFKRAKDALEESLLLKDCKXRSRLFPRTWDLRQLQVRERPVALEAELALTLKVLEATADTDPALGDVLDQPLHTLHHILSQLRACIQPQPTAGPRTRGRLHHWLHRLQEAPKKESPGCLEASVTFNLFRLLTRDLNCVASGDLCVGGGGSGGGGSGGGGSGGGGSGGGGSRPRLAPPQNVTLLSQNFSVYLTWLPGLGNPQDVTYFVAYQSSPTRRRWREVEECAGTKELLCSMMCLKKQDLYNKFKGRVRTVSPSSKSPWVESEYLDYLFEVEPAPPVLVLTQTEEILSANATYQLPPCMPPLDLKYEVAFWKEGAGNKTLFPVTPHGQPVQITLQPAASEHHCLSARTIYTFSVPKYSKFSKPTCFLLEVPEANWA

SEQ ID NO: 126 - protein, 433 aa, Artificial
  interferon lambda fusion protein
  misc_feature (140)..(140): Xaa can be any naturally occurring amino acid
MKLDMTGDCMPVLVLMAAVLTVTGAVPVARLRGALPDARGCHIAQFKSLSPQELQAFKRAKDALEESLLLKDCKCRSRLFPRTWDLRQLQVRERPVALEAELALTLKVLEATADTDPALGDVLDQPLHTLHHILSQLRAXIQPQPTAGPRTRGRLHHWLHRLQEAPKKESPGCLEASVTFNLFRLLTRDLNCVASGDLCVGGGGSGGGGSGGGGSGGGGSGGGGSRPRLAPPQNVTLLSQNFSVYLTWLPGLGNPQDVTYFVAYQSSPTRRRWREVEECAGTKELLCSMMCLKKQDLYNKFKGRVRTVSPSSKSPWVESEYLDYLFEVEPAPPVLVLTQTEEILSANATYQLPPCMPPLDLKYEVAFWKEGAGNKTLFPVTPHGQPVQITLQPAASEHHCLSARTIYTFSVPKYSKFSKPTCFLLEVPEANWA

SEQ ID NO: 127 - protein, 433 aa, Artificial
  interferon lambda fusion  protein
  misc_feature (173)..(173): Xaa can be any naturally occurring amino acid
MKLDMTGDCMPVLVLMAAVLTVTGAVPVARLRGALPDARGCHIAQFKSLSPQELQAFKRAKDALEESLLLKDCKCRSRLFPRTWDLRQLQVRERPVALEAELALTLKVLEATADTDPALGDVLDQPLHTLHHILSQLRACIQPQPTAGPRTRGRLHHWLHRLQEAPKKESPGXLEASVTFNLFRLLTRDLNCVASGDLCVGGGGSGGGGSGGGGSGGGGSGGGGSRPRLAPPQNVTLLSQNFSVYLTWLPGLGNPQDVTYFVAYQSSPTRRRWREVEECAGTKELLCSMMCLKKQDLYNKFKGRVRTVSPSSKSPWVESEYLDYLFEVEPAPPVLVLTQTEEILSANATYQLPPCMPPLDLKYEVAFWKEGAGNKTLFPVTPHGQPVQITLQPAASEHHCLSARTIYTFSVPKYSKFSKPTCFLLEVPEANWA

SEQ ID NO: 128 - protein, 433 aa, Artificial
  interferon lambda fusion protein
  misc_feature (192)..(192): Xaa can be any naturally occurring amino acid
MKLDMTGDCMPVLVLMAAVLTVTGAVPVARLRGALPDARGCHIAQFKSLSPQELQAFKRAKDALEESLLLKDCKCRSRLFPRTWDLRQLQVRERPVALEAELALTLKVLEATADTDPALGDVLDQPLHTLHHILSQLRACIQPQPTAGPRTRGRLHHWLHRLQEAPKKESPGCLEASVTFNLFRLLTRDLNXVASGDLCVGGGGSGGGGSGGGGSGGGGSGGGGSRPRLAPPQNVTLLSQNFSVYLTWLPGLGNPQDVTYFVAYQSSPTRRRWREVEECAGTKELLCSMMCLKKQDLYNKFKGRVRTVSPSSKSPWVESEYLDYLFEVEPAPPVLVLTQTEEILSANATYQLPPCMPPLDLKYEVAFWKEGAGNKTLFPVTPHGQPVQITLQPAASEHHCLSARTIYTFSVPKYSKFSKPTCFLLEVPEANWA

SEQ ID NO: 129 - protein, 433 aa, Artificial
  interferon lambda fusion protein
  misc_feature (199)..(199): Xaa can be any naturally occurring amino acid
MKLDMTGDCMPVLVLMAAVLTVTGAVPVARLRGALPDARGCHIAQFKSLSPQELQAFKRAKDALEESLLLKDCKCRSRLFPRTWDLRQLQVRERPVALEAELALTLKVLEATADTDPALGDVLDQPLHTLHHILSQLRACIQPQPTAGPRTRGRLHHWLHRLQEAPKKESPGCLEASVTFNLFRLLTRDLNCVASGDLXVGGGGSGGGGSGGGGSGGGGSGGGGSRPRLAPPQNVTLLSQNFSVYLTWLPGLGNPQDVTYFVAYQSSPTRRRWREVEECAGTKELLCSMMCLKKQDLYNKFKGRVRTVSPSSKSPWVESEYLDYLFEVEPAPPVLVLTQTEEILSANATYQLPPCMPPLDLKYEVAFWKEGAGNKTLFPVTPHGQPVQITLQPAASEHHCLSARTIYTFSVPKYSKFSKPTCFLLEVPEANWA

SEQ ID NO: 130 - protein, 433 aa, Artificial
  interferon lambda fusion protein
  misc_feature (291)..(291): Xaa can be any naturally occurring amino acid
  misc_feature (355)..(355): Xaa can be any naturally occurring amino acid
MKLDMTGDCMPVLVLMAAVLTVTGAVPVARLRGALPDARGCHIAQFKSLSPQELQAFKRAKDALEESLLLKDCKCRSRLFPRTWDLRQLQVRERPVALEAELALTLKVLEATADTDPALGDVLDQPLHTLHHILSQLRACIQPQPTAGPRTRGRLHHWLHRLQEAPKKESPGCLEASVTFNLFRLLTRDLNCVASGDLCVGGGGSGGGGSGGGGSGGGGSGGGGSRPRLAPPQNVTLLSQNFSVYLTWLPGLGNPQDVTYFVAYQSSPTRRRWREVEECAGTKELLCSMMXLKKQDLYNKFKGRVRTVSPSSKSPWVESEYLDYLFEVEPAPPVLVLTQTEEILSANATYQLPPXMPPLDLKYEVAFWKEGAGNKTLFPVTPHGQPVQITLQPAASEHHCLSARTIYTFSVPKYSKFSKPTCFLLEVPEANWA

SEQ ID NO: 131 - protein, 433 aa, Artificial
  interferon lambda fusion protein
  misc_feature (41)..(41): Xaa can be any naturally occurring amino acid
  misc_feature (291)..(291): Xaa can be any naturally occurring amino acid
  misc_feature (355)..(355): Xaa can be any naturally occurring amino acid
MKLDMTGDCMPVLVLMAAVLTVTGAVPVARLRGALPDARGXHIAQFKSLSPQELQAFKRAKDALEESLLLKDCKCRSRLFPRTWDLRQLQVRERPVALEAELALTLKVLEATADTDPALGDVLDQPLHTLHHILSQLRACIQPQPTAGPRTRGRLHHWLHRLQEAPKKESPGCLEASVTFNLFRLLTRDLNCVASGDLCVGGGGSGGGGSGGGGSGGGGSGGGGSRPRLAPPQNVTLLSQNFSVYLTWLPGLGNPQDVTYFVAYQSSPTRRRWREVEECAGTKELLCSMMXLKKQDLYNKFKGRVRTVSPSSKSPWVESEYLDYLFEVEPAPPVLVLTQTEEILSANATYQLPPXMPPLDLKYEVAFWKEGAGNKTLFPVTPHGQPVQITLQPAASEHHCLSARTIYTFSVPKYSKFSKPTCFLLEVPEANWA

SEQ ID NO: 132 - protein, 433 aa, Artificial
  interferon lambda fusion protein
  misc_feature (73)..(73): Xaa can be any naturally occurring amino acid
  misc_feature (291)..(291): Xaa can be any naturally occurring amino acid
  misc_feature (355)..(355): Xaa can be any naturally occurring amino acid
MKLDMTGDCMPVLVLMAAVLTVTGAVPVARLRGALPDARGCHIAQFKSLSPQELQAFKRAKDALEESLLLKDXKCRSRLFPRTWDLRQLQVRERPVALEAELALTLKVLEATADTDPALGDVLDQPLHTLHHILSQLRACIQPQPTAGPRTRGRLHHWLHRLQEAPKKESPGCLEASVTFNLFRLLTRDLNCVASGDLCVGGGGSGGGGSGGGGSGGGGSGGGGSRPRLAPPQNVTLLSQNFSVYLTWLPGLGNPQDVTYFVAYQSSPTRRRWREVEECAGTKELLCSMMXLKKQDLYNKFKGRVRTVSPSSKSPWVESEYLDYLFEVEPAPPVLVLTQTEEILSANATYQLPPXMPPLDLKYEVAFWKEGAGNKTLFPVTPHGQPVQITLQPAASEHHCLSARTIYTFSVPKYSKFSKPTCFLLEVPEANWA

SEQ ID NO: 133 - protein, 433 aa, Artificial
  interferon lambda fusion protein
  misc_feature (75)..(75): Xaa can be any naturally occurring amino acid
  misc_feature (291)..(291): Xaa can be any naturally occurring amino acid
  misc_feature (355)..(355): Xaa can be any naturally occurring amino acid
MKLDMTGDCMPVLVLMAAVLTVTGAVPVARLRGALPDARGCHIAQFKSLSPQELQAFKRAKDALEESLLLKDCKXRSRLFPRTWDLRQLQVRERPVALEAELALTLKVLEATADTDPALGDVLDQPLHTLHHILSQLRACIQPQPTAGPRTRGRLHHWLHRLQEAPKKESPGCLEASVTFNLFRLLTRDLNCVASGDLCVGGGGSGGGGSGGGGSGGGGSGGGGSRPRLAPPQNVTLLSQNFSVYLTWLPGLGNPQDVTYFVAYQSSPTRRRWREVEECAGTKELLCSMMXLKKQDLYNKFKGRVRTVSPSSKSPWVESEYLDYLFEVEPAPPVLVLTQTEEILSANATYQLPPXMPPLDLKYEVAFWKEGAGNKTLFPVTPHGQPVQITLQPAASEHHCLSARTIYTFSVPKYSKFSKPTCFLLEVPEANWA

SEQ ID NO: 134 - protein, 433 aa, Artificial
  interferon lambda fusion protein
  misc_feature (140)..(140): Xaa can be any naturally occurring amino acid
  misc_feature (291)..(291): Xaa can be any naturally occurring amino acid
  misc_feature (355)..(355): Xaa can be any naturally occurring amino acid
MKLDMTGDCMPVLVLMAAVLTVTGAVPVARLRGALPDARGCHIAQFKSLSPQELQAFKRAKDALEESLLLKDCKCRSRLFPRTWDLRQLQVRERPVALEAELALTLKVLEATADTDPALGDVLDQPLHTLHHILSQLRAXIQPQPTAGPRTRGRLHHWLHRLQEAPKKESPGCLEASVTFNLFRLLTRDLNCVASGDLCVGGGGSGGGGSGGGGSGGGGSGGGGSRPRLAPPQNVTLLSQNFSVYLTWLPGLGNPQDVTYFVAYQSSPTRRRWREVEECAGTKELLCSMMXLKKQDLYNKFKGRVRTVSPSSKSPWVESEYLDYLFEVEPAPPVLVLTQTEEILSANATYQLPPXMPPLDLKYEVAFWKEGAGNKTLFPVTPHGQPVQITLQPAASEHHCLSARTIYTFSVPKYSKFSKPTCFLLEVPEANWA

SEQ ID NO: 135 - protein, 433 aa, Artificial
  interferon lambda fusion  protein
  misc_feature (173)..(173): Xaa can be any naturally occurring amino acid
  misc_feature (291)..(291): Xaa can be any naturally occurring amino acid
  misc_feature (355)..(355): Xaa can be any naturally occurring amino acid
MKLDMTGDCMPVLVLMAAVLTVTGAVPVARLRGALPDARGCHIAQFKSLSPQELQAFKRAKDALEESLLLKDCKCRSRLFPRTWDLRQLQVRERPVALEAELALTLKVLEATADTDPALGDVLDQPLHTLHHILSQLRACIQPQPTAGPRTRGRLHHWLHRLQEAPKKESPGXLEASVTFNLFRLLTRDLNCVASGDLCVGGGGSGGGGSGGGGSGGGGSGGGGSRPRLAPPQNVTLLSQNFSVYLTWLPGLGNPQDVTYFVAYQSSPTRRRWREVEECAGTKELLCSMMXLKKQDLYNKFKGRVRTVSPSSKSPWVESEYLDYLFEVEPAPPVLVLTQTEEILSANATYQLPPXMPPLDLKYEVAFWKEGAGNKTLFPVTPHGQPVQITLQPAASEHHCLSARTIYTFSVPKYSKFSKPTCFLLEVPEANWA

SEQ ID NO: 136 - protein, 433 aa, Artificial
  interferon lambda fusion protein
  misc_feature (192)..(192): Xaa can be any naturally occurring amino acid
  misc_feature (291)..(291): Xaa can be any naturally occurring amino acid
  misc_feature (355)..(355): Xaa can be any naturally occurring amino acid
MKLDMTGDCMPVLVLMAAVLTVTGAVPVARLRGALPDARGCHIAQFKSLSPQELQAFKRAKDALEESLLLKDCKCRSRLFPRTWDLRQLQVRERPVALEAELALTLKVLEATADTDPALGDVLDQPLHTLHHILSQLRACIQPQPTAGPRTRGRLHHWLHRLQEAPKKESPGCLEASVTFNLFRLLTRDLNXVASGDLCVGGGGSGGGGSGGGGSGGGGSGGGGSRPRLAPPQNVTLLSQNFSVYLTWLPGLGNPQDVTYFVAYQSSPTRRRWREVEECAGTKELLCSMMXLKKQDLYNKFKGRVRTVSPSSKSPWVESEYLDYLFEVEPAPPVLVLTQTEEILSANATYQLPPXMPPLDLKYEVAFWKEGAGNKTLFPVTPHGQPVQITLQPAASEHHCLSARTIYTFSVPKYSKFSKPTCFLLEVPEANWA

SEQ ID NO: 137 - protein, 433 aa, Artificial
  interferon lambda fusion protein
  misc_feature (199)..(199): Xaa can be any naturally occurring amino acid
  misc_feature (291)..(291): Xaa can be any naturally occurring amino acid
  misc_feature (355)..(355): Xaa can be any naturally occurring amino acid
MKLDMTGDCMPVLVLMAAVLTVTGAVPVARLRGALPDARGCHIAQFKSLSPQELQAFKRAKDALEESLLLKDCKCRSRLFPRTWDLRQLQVRERPVALEAELALTLKVLEATADTDPALGDVLDQPLHTLHHILSQLRACIQPQPTAGPRTRGRLHHWLHRLQEAPKKESPGCLEASVTFNLFRLLTRDLNCVASGDLXVGGGGSGGGGSGGGGSGGGGSGGGGSRPRLAPPQNVTLLSQNFSVYLTWLPGLGNPQDVTYFVAYQSSPTRRRWREVEECAGTKELLCSMMXLKKQDLYNKFKGRVRTVSPSSKSPWVESEYLDYLFEVEPAPPVLVLTQTEEILSANATYQLPPXMPPLDLKYEVAFWKEGAGNKTLFPVTPHGQPVQITLQPAASEHHCLSARTIYTFSVPKYSKFSKPTCFLLEVPEANWA

SEQ ID NO: 138 - protein, 421 aa, Artificial
  interferon lambda fusion  protein
MKLDMTGDCMPVLVLMAAVLTVTGAVPVARLRGALPDARGCHIAQFKSLSPQELQAFKRAKDALEESLLLKDCKCRSRLFPRTWDLRQLQVRERPVALEAELALTLKVLEATADTDPALGDVLDQPLHTLHHILSQLRACIQPQPTAGPRTRGRLHHWLHRLQEAPKKESPGCLEASVTFNLFRLLTRDLNCVASGDLCVGGGGSGGGGSGGGGSGGGGSMVPPPENVRMNSVNFKNILQWESPAFAKGNLTFTAQYLSYRIFQDKCMNTTLTECDFSSLSKYGDHTLRVRAEFADEHSDWVNITFCPVDDTIIGPPGMQVEVLADSLHMRFLAPKIENEYETWTMKNVYNSWTYNVQYWKNGTDEKFQITPQYDFEVLRNLEPWTTYCVQVRGFLPDRNKAGEWSEPVCEQTTHDETVPS

SEQ ID NO: 139 - protein, 421 aa, Artificial
  interferon lambda fusion protein
  misc_feature (41)..(41): Xaa can be any naturally occurring amino acid
MKLDMTGDCMPVLVLMAAVLTVTGAVPVARLRGALPDARGXHIAQFKSLSPQELQAFKRAKDALEESLLLKDCKCRSRLFPRTWDLRQLQVRERPVALEAELALTLKVLEATADTDPALGDVLDQPLHTLHHILSQLRACIQPQPTAGPRTRGRLHHWLHRLQEAPKKESPGCLEASVTFNLFRLLTRDLNCVASGDLCVGGGGSGGGGSGGGGSGGGGSMVPPPENVRMNSVNFKNILQWESPAFAKGNLTFTAQYLSYRIFQDKCMNTTLTECDFSSLSKYGDHTLRVRAEFADEHSDWVNITFCPVDDTIIGPPGMQVEVLADSLHMRFLAPKIENEYETWTMKNVYNSWTYNVQYWKNGTDEKFQITPQYDFEVLRNLEPWTTYCVQVRGFLPDRNKAGEWSEPVCEQTTHDETVPS

SEQ ID NO: 140 - protein, 421 aa, Artificial
  interferon lambda fusion protein
  misc_feature (73)..(73): Xaa can be any naturally occurring amino acid
MKLDMTGDCMPVLVLMAAVLTVTGAVPVARLRGALPDARGCHIAQFKSLSPQELQAFKRAKDALEESLLLKDXKCRSRLFPRTWDLRQLQVRERPVALEAELALTLKVLEATADTDPALGDVLDQPLHTLHHILSQLRACIQPQPTAGPRTRGRLHHWLHRLQEAPKKESPGCLEASVTFNLFRLLTRDLNCVASGDLCVGGGGSGGGGSGGGGSGGGGSMVPPPENVRMNSVNFKNILQWESPAFAKGNLTFTAQYLSYRIFQDKCMNTTLTECDFSSLSKYGDHTLRVRAEFADEHSDWVNITFCPVDDTIIGPPGMQVEVLADSLHMRFLAPKIENEYETWTMKNVYNSWTYNVQYWKNGTDEKFQITPQYDFEVLRNLEPWTTYCVQVRGFLPDRNKAGEWSEPVCEQTTHDETVPS

SEQ ID NO: 141 - protein, 421 aa, Artificial
  interferon lambda fusion protein
  misc_feature (75)..(75): Xaa can be any naturally occurring amino acid
MKLDMTGDCMPVLVLMAAVLTVTGAVPVARLRGALPDARGCHIAQFKSLSPQELQAFKRAKDALEESLLLKDCKXRSRLFPRTWDLRQLQVRERPVALEAELALTLKVLEATADTDPALGDVLDQPLHTLHHILSQLRACIQPQPTAGPRTRGRLHHWLHRLQEAPKKESPGCLEASVTFNLFRLLTRDLNCVASGDLCVGGGGSGGGGSGGGGSGGGGSMVPPPENVRMNSVNFKNILQWESPAFAKGNLTFTAQYLSYRIFQDKCMNTTLTECDFSSLSKYGDHTLRVRAEFADEHSDWVNITFCPVDDTIIGPPGMQVEVLADSLHMRFLAPKIENEYETWTMKNVYNSWTYNVQYWKNGTDEKFQITPQYDFEVLRNLEPWTTYCVQVRGFLPDRNKAGEWSEPVCEQTTHDETVPS

SEQ ID NO: 142 - protein, 421 aa, Artificial
  interferon lambda fusion protein
  misc_feature (140)..(140): Xaa can be any naturally occurring amino acid
MKLDMTGDCMPVLVLMAAVLTVTGAVPVARLRGALPDARGCHIAQFKSLSPQELQAFKRAKDALEESLLLKDCKCRSRLFPRTWDLRQLQVRERPVALEAELALTLKVLEATADTDPALGDVLDQPLHTLHHILSQLRAXIQPQPTAGPRTRGRLHHWLHRLQEAPKKESPGCLEASVTFNLFRLLTRDLNCVASGDLCVGGGGSGGGGSGGGGSGGGGSMVPPPENVRMNSVNFKNILQWESPAFAKGNLTFTAQYLSYRIFQDKCMNTTLTECDFSSLSKYGDHTLRVRAEFADEHSDWVNITFCPVDDTIIGPPGMQVEVLADSLHMRFLAPKIENEYETWTMKNVYNSWTYNVQYWKNGTDEKFQITPQYDFEVLRNLEPWTTYCVQVRGFLPDRNKAGEWSEPVCEQTTHDETVPS

SEQ ID NO: 143 - protein, 421 aa, Artificial
  interferon lambda fusion protein
  misc_feature (173)..(173): Xaa can be any naturally occurring amino acid
MKLDMTGDCMPVLVLMAAVLTVTGAVPVARLRGALPDARGCHIAQFKSLSPQELQAFKRAKDALEESLLLKDCKCRSRLFPRTWDLRQLQVRERPVALEAELALTLKVLEATADTDPALGDVLDQPLHTLHHILSQLRACIQPQPTAGPRTRGRLHHWLHRLQEAPKKESPGXLEASVTFNLFRLLTRDLNCVASGDLCVGGGGSGGGGSGGGGSGGGGSMVPPPENVRMNSVNFKNILQWESPAFAKGNLTFTAQYLSYRIFQDKCMNTTLTECDFSSLSKYGDHTLRVRAEFADEHSDWVNITFCPVDDTIIGPPGMQVEVLADSLHMRFLAPKIENEYETWTMKNVYNSWTYNVQYWKNGTDEKFQITPQYDFEVLRNLEPWTTYCVQVRGFLPDRNKAGEWSEPVCEQTTHDETVPS

SEQ ID NO: 144 - protein, 421 aa, Artificial
  interferon lambda fusion protein
  misc_feature (192)..(192): Xaa can be any naturally occurring amino acid
MKLDMTGDCMPVLVLMAAVLTVTGAVPVARLRGALPDARGCHIAQFKSLSPQELQAFKRAKDALEESLLLKDCKCRSRLFPRTWDLRQLQVRERPVALEAELALTLKVLEATADTDPALGDVLDQPLHTLHHILSQLRACIQPQPTAGPRTRGRLHHWLHRLQEAPKKESPGCLEASVTFNLFRLLTRDLNXVASGDLCVGGGGSGGGGSGGGGSGGGGSMVPPPENVRMNSVNFKNILQWESPAFAKGNLTFTAQYLSYRIFQDKCMNTTLTECDFSSLSKYGDHTLRVRAEFADEHSDWVNITFCPVDDTIIGPPGMQVEVLADSLHMRFLAPKIENEYETWTMKNVYNSWTYNVQYWKNGTDEKFQITPQYDFEVLRNLEPWTTYCVQVRGFLPDRNKAGEWSEPVCEQTTHDETVPS

SEQ ID NO: 145 - protein, 421 aa, Artificial
  interferon lambda fusion protein
  misc_feature (199)..(199): Xaa can be any naturally occurring amino acid
MKLDMTGDCMPVLVLMAAVLTVTGAVPVARLRGALPDARGCHIAQFKSLSPQELQAFKRAKDALEESLLLKDCKCRSRLFPRTWDLRQLQVRERPVALEAELALTLKVLEATADTDPALGDVLDQPLHTLHHILSQLRACIQPQPTAGPRTRGRLHHWLHRLQEAPKKESPGCLEASVTFNLFRLLTRDLNCVASGDLXVGGGGSGGGGSGGGGSGGGGSMVPPPENVRMNSVNFKNILQWESPAFAKGNLTFTAQYLSYRIFQDKCMNTTLTECDFSSLSKYGDHTLRVRAEFADEHSDWVNITFCPVDDTIIGPPGMQVEVLADSLHMRFLAPKIENEYETWTMKNVYNSWTYNVQYWKNGTDEKFQITPQYDFEVLRNLEPWTTYCVQVRGFLPDRNKAGEWSEPVCEQTTHDETVPS

SEQ ID NO: 146 - protein, 421 aa, Artificial
  interferon lambda fusion protein
  misc_feature (307)..(307): Xaa can be any naturally occurring amino acid
MKLDMTGDCMPVLVLMAAVLTVTGAVPVARLRGALPDARGCHIAQFKSLSPQELQAFKRAKDALEESLLLKDCKCRSRLFPRTWDLRQLQVRERPVALEAELALTLKVLEATADTDPALGDVLDQPLHTLHHILSQLRACIQPQPTAGPRTRGRLHHWLHRLQEAPKKESPGCLEASVTFNLFRLLTRDLNCVASGDLCVGGGGSGGGGSGGGGSGGGGSMVPPPENVRMNSVNFKNILQWESPAFAKGNLTFTAQYLSYRIFQDKCMNTTLTECDFSSLSKYGDHTLRVRAEFADEHSDWVNITFXPVDDTIIGPPGMQVEVLADSLHMRFLAPKIENEYETWTMKNVYNSWTYNVQYWKNGTDEKFQITPQYDFEVLRNLEPWTTYCVQVRGFLPDRNKAGEWSEPVCEQTTHDETVPS

SEQ ID NO: 147 - protein, 421 aa, Artificial
  interferon lambda fusion protein
  misc_feature (41)..(41): Xaa can be any naturally occurring amino acid
  misc_feature (307)..(307): Xaa can be any naturally occurring amino acid
MKLDMTGDCMPVLVLMAAVLTVTGAVPVARLRGALPDARGXHIAQFKSLSPQELQAFKRAKDALEESLLLKDCKCRSRLFPRTWDLRQLQVRERPVALEAELALTLKVLEATADTDPALGDVLDQPLHTLHHILSQLRACIQPQPTAGPRTRGRLHHWLHRLQEAPKKESPGCLEASVTFNLFRLLTRDLNCVASGDLCVGGGGSGGGGSGGGGSGGGGSMVPPPENVRMNSVNFKNILQWESPAFAKGNLTFTAQYLSYRIFQDKCMNTTLTECDFSSLSKYGDHTLRVRAEFADEHSDWVNITFXPVDDTIIGPPGMQVEVLADSLHMRFLAPKIENEYETWTMKNVYNSWTYNVQYWKNGTDEKFQITPQYDFEVLRNLEPWTTYCVQVRGFLPDRNKAGEWSEPVCEQTTHDETVPS

SEQ ID NO: 148 - protein, 421 aa, Artificial
  interferon lambda fusion protein
  misc_feature (73)..(73): Xaa can be any naturally occurring amino acid
  misc_feature (307)..(307): Xaa can be any naturally occurring amino acid
MKLDMTGDCMPVLVLMAAVLTVTGAVPVARLRGALPDARGCHIAQFKSLSPQELQAFKRAKDALEESLLLKDXKCRSRLFPRTWDLRQLQVRERPVALEAELALTLKVLEATADTDPALGDVLDQPLHTLHHILSQLRACIQPQPTAGPRTRGRLHHWLHRLQEAPKKESPGCLEASVTFNLFRLLTRDLNCVASGDLCVGGGGSGGGGSGGGGSGGGGSMVPPPENVRMNSVNFKNILQWESPAFAKGNLTFTAQYLSYRIFQDKCMNTTLTECDFSSLSKYGDHTLRVRAEFADEHSDWVNITFXPVDDTIIGPPGMQVEVLADSLHMRFLAPKIENEYETWTMKNVYNSWTYNVQYWKNGTDEKFQITPQYDFEVLRNLEPWTTYCVQVRGFLPDRNKAGEWSEPVCEQTTHDETVPS

SEQ ID NO: 149 - protein, 421 aa, Artificial
  interferon lambda fusion protein
  misc_feature (75)..(75): Xaa can be any naturally occurring amino acid
  misc_feature (307)..(307): Xaa can be any naturally occurring amino acid
MKLDMTGDCMPVLVLMAAVLTVTGAVPVARLRGALPDARGCHIAQFKSLSPQELQAFKRAKDALEESLLLKDCKXRSRLFPRTWDLRQLQVRERPVALEAELALTLKVLEATADTDPALGDVLDQPLHTLHHILSQLRACIQPQPTAGPRTRGRLHHWLHRLQEAPKKESPGCLEASVTFNLFRLLTRDLNCVASGDLCVGGGGSGGGGSGGGGSGGGGSMVPPPENVRMNSVNFKNILQWESPAFAKGNLTFTAQYLSYRIFQDKCMNTTLTECDFSSLSKYGDHTLRVRAEFADEHSDWVNITFXPVDDTIIGPPGMQVEVLADSLHMRFLAPKIENEYETWTMKNVYNSWTYNVQYWKNGTDEKFQITPQYDFEVLRNLEPWTTYCVQVRGFLPDRNKAGEWSEPVCEQTTHDETVPS

SEQ ID NO: 150 - protein, 421 aa, Artificial
  interferon lambda fusion protein
  misc_feature (140)..(140): Xaa can be any naturally occurring amino acid
  misc_feature (307)..(307): Xaa can be any naturally occurring amino acid
MKLDMTGDCMPVLVLMAAVLTVTGAVPVARLRGALPDARGCHIAQFKSLSPQELQAFKRAKDALEESLLLKDCKCRSRLFPRTWDLRQLQVRERPVALEAELALTLKVLEATADTDPALGDVLDQPLHTLHHILSQLRAXIQPQPTAGPRTRGRLHHWLHRLQEAPKKESPGCLEASVTFNLFRLLTRDLNCVASGDLCVGGGGSGGGGSGGGGSGGGGSMVPPPENVRMNSVNFKNILQWESPAFAKGNLTFTAQYLSYRIFQDKCMNTTLTECDFSSLSKYGDHTLRVRAEFADEHSDWVNITFXPVDDTIIGPPGMQVEVLADSLHMRFLAPKIENEYETWTMKNVYNSWTYNVQYWKNGTDEKFQITPQYDFEVLRNLEPWTTYCVQVRGFLPDRNKAGEWSEPVCEQTTHDETVPS

SEQ ID NO: 151 - protein, 421 aa, Artificial
  interferon lambda fusion protein
  misc_feature (173)..(173): Xaa can be any naturally occurring amino acid
  misc_feature (307)..(307): Xaa can be any naturally occurring amino acid
MKLDMTGDCMPVLVLMAAVLTVTGAVPVARLRGALPDARGCHIAQFKSLSPQELQAFKRAKDALEESLLLKDCKCRSRLFPRTWDLRQLQVRERPVALEAELALTLKVLEATADTDPALGDVLDQPLHTLHHILSQLRACIQPQPTAGPRTRGRLHHWLHRLQEAPKKESPGXLEASVTFNLFRLLTRDLNCVASGDLCVGGGGSGGGGSGGGGSGGGGSMVPPPENVRMNSVNFKNILQWESPAFAKGNLTFTAQYLSYRIFQDKCMNTTLTECDFSSLSKYGDHTLRVRAEFADEHSDWVNITFXPVDDTIIGPPGMQVEVLADSLHMRFLAPKIENEYETWTMKNVYNSWTYNVQYWKNGTDEKFQITPQYDFEVLRNLEPWTTYCVQVRGFLPDRNKAGEWSEPVCEQTTHDETVPS

SEQ ID NO: 152 - protein, 421 aa, Artificial
  interferon lambda fusion protein
  misc_feature (192)..(192): Xaa can be any naturally occurring amino acid
  misc_feature (307)..(307): Xaa can be any naturally occurring amino acid
MKLDMTGDCMPVLVLMAAVLTVTGAVPVARLRGALPDARGCHIAQFKSLSPQELQAFKRAKDALEESLLLKDCKCRSRLFPRTWDLRQLQVRERPVALEAELALTLKVLEATADTDPALGDVLDQPLHTLHHILSQLRACIQPQPTAGPRTRGRLHHWLHRLQEAPKKESPGCLEASVTFNLFRLLTRDLNXVASGDLCVGGGGSGGGGSGGGGSGGGGSMVPPPENVRMNSVNFKNILQWESPAFAKGNLTFTAQYLSYRIFQDKCMNTTLTECDFSSLSKYGDHTLRVRAEFADEHSDWVNITFXPVDDTIIGPPGMQVEVLADSLHMRFLAPKIENEYETWTMKNVYNSWTYNVQYWKNGTDEKFQITPQYDFEVLRNLEPWTTYCVQVRGFLPDRNKAGEWSEPVCEQTTHDETVPS

SEQ ID NO: 153 - protein, 421 aa, Artificial
  interferon lambda fusion protein
  misc_feature (199)..(199): Xaa can be any naturally occurring amino acid
  misc_feature (307)..(307): Xaa can be any naturally occurring amino acid
MKLDMTGDCMPVLVLMAAVLTVTGAVPVARLRGALPDARGCHIAQFKSLSPQELQAFKRAKDALEESLLLKDCKCRSRLFPRTWDLRQLQVRERPVALEAELALTLKVLEATADTDPALGDVLDQPLHTLHHILSQLRACIQPQPTAGPRTRGRLHHWLHRLQEAPKKESPGCLEASVTFNLFRLLTRDLNCVASGDLXVGGGGSGGGGSGGGGSGGGGSMVPPPENVRMNSVNFKNILQWESPAFAKGNLTFTAQYLSYRIFQDKCMNTTLTECDFSSLSKYGDHTLRVRAEFADEHSDWVNITFXPVDDTIIGPPGMQVEVLADSLHMRFLAPKIENEYETWTMKNVYNSWTYNVQYWKNGTDEKFQITPQYDFEVLRNLEPWTTYCVQVRGFLPDRNKAGEWSEPVCEQTTHDETVPS

SEQ ID NO: 154 - protein, 423 aa, Artificial
  interferon lambda fusion protein
MAGPERWGPLLLCLLQAAPGRPRLAPPQNVTLLSQNFSVYLTWLPGLGNPQDVTYFVAYQSSPTRRRWREVEECAGTKELLCSMMCLKKQDLYNKFKGRVRTVSPSSKSPWVESEYLDYLFEVEPAPPVLVLTQTEEILSANATYQLPPCMPPLDLKYEVAFWKEGAGNKTLFPVTPHGQPVQITLQPAASEHHCLSARTIYTFSVPKYSKFSKPTCFLLEVPEANWAGGGGSGGGGSGGGGSGGGGSVPVARLRGALPDARGCHIAQFKSLSPQELQAFKRAKDALEESLLLKDCKCRSRLFPRTWDLRQLQVRERPVALEAELALTLKVLEATADTDPALGDVLDQPLHTLHHILSQLRACIQPQPTAGPRTRGRLHHWLHRLQEAPKKESPGCLEASVTFNLFRLLTRDLNCVASGDLCV

SEQ ID NO: 155 - protein, 423 aa, Artificial
  interferon lambda fusion protein
  misc_feature (264)..(264): Xaa can be any naturally occurring amino acid
MAGPERWGPLLLCLLQAAPGRPRLAPPQNVTLLSQNFSVYLTWLPGLGNPQDVTYFVAYQSSPTRRRWREVEECAGTKELLCSMMCLKKQDLYNKFKGRVRTVSPSSKSPWVESEYLDYLFEVEPAPPVLVLTQTEEILSANATYQLPPCMPPLDLKYEVAFWKEGAGNKTLFPVTPHGQPVQITLQPAASEHHCLSARTIYTFSVPKYSKFSKPTCFLLEVPEANWAGGGGSGGGGSGGGGSGGGGSVPVARLRGALPDARGXHIAQFKSLSPQELQAFKRAKDALEESLLLKDCKCRSRLFPRTWDLRQLQVRERPVALEAELALTLKVLEATADTDPALGDVLDQPLHTLHHILSQLRACIQPQPTAGPRTRGRLHHWLHRLQEAPKKESPGCLEASVTFNLFRLLTRDLNCVASGDLCV

SEQ ID NO: 156 - protein, 423 aa, Artificial
  interferon lambda fusion protein
  misc_feature (296)..(296): Xaa can be any naturally occurring amino acid
MAGPERWGPLLLCLLQAAPGRPRLAPPQNVTLLSQNFSVYLTWLPGLGNPQDVTYFVAYQSSPTRRRWREVEECAGTKELLCSMMCLKKQDLYNKFKGRVRTVSPSSKSPWVESEYLDYLFEVEPAPPVLVLTQTEEILSANATYQLPPCMPPLDLKYEVAFWKEGAGNKTLFPVTPHGQPVQITLQPAASEHHCLSARTIYTFSVPKYSKFSKPTCFLLEVPEANWAGGGGSGGGGSGGGGSGGGGSVPVARLRGALPDARGCHIAQFKSLSPQELQAFKRAKDALEESLLLKDXKCRSRLFPRTWDLRQLQVRERPVALEAELALTLKVLEATADTDPALGDVLDQPLHTLHHILSQLRACIQPQPTAGPRTRGRLHHWLHRLQEAPKKESPGCLEASVTFNLFRLLTRDLNCVASGDLCV

SEQ ID NO: 157 - protein, 423 aa, Artificial
  interferon lambda fusion protein
  misc_feature (298)..(298): Xaa can be any naturally occurring amino acid
MAGPERWGPLLLCLLQAAPGRPRLAPPQNVTLLSQNFSVYLTWLPGLGNPQDVTYFVAYQSSPTRRRWREVEECAGTKELLCSMMCLKKQDLYNKFKGRVRTVSPSSKSPWVESEYLDYLFEVEPAPPVLVLTQTEEILSANATYQLPPCMPPLDLKYEVAFWKEGAGNKTLFPVTPHGQPVQITLQPAASEHHCLSARTIYTFSVPKYSKFSKPTCFLLEVPEANWAGGGGSGGGGSGGGGSGGGGSVPVARLRGALPDARGCHIAQFKSLSPQELQAFKRAKDALEESLLLKDCKXRSRLFPRTWDLRQLQVRERPVALEAELALTLKVLEATADTDPALGDVLDQPLHTLHHILSQLRACIQPQPTAGPRTRGRLHHWLHRLQEAPKKESPGCLEASVTFNLFRLLTRDLNCVASGDLCV

SEQ ID NO: 158 - protein, 423 aa, Artificial
  interferon lambda fusion protein
  misc_feature (363)..(363): Xaa can be any naturally occurring amino acid
MAGPERWGPLLLCLLQAAPGRPRLAPPQNVTLLSQNFSVYLTWLPGLGNPQDVTYFVAYQSSPTRRRWREVEECAGTKELLCSMMCLKKQDLYNKFKGRVRTVSPSSKSPWVESEYLDYLFEVEPAPPVLVLTQTEEILSANATYQLPPCMPPLDLKYEVAFWKEGAGNKTLFPVTPHGQPVQITLQPAASEHHCLSARTIYTFSVPKYSKFSKPTCFLLEVPEANWAGGGGSGGGGSGGGGSGGGGSVPVARLRGALPDARGCHIAQFKSLSPQELQAFKRAKDALEESLLLKDCKCRSRLFPRTWDLRQLQVRERPVALEAELALTLKVLEATADTDPALGDVLDQPLHTLHHILSQLRAXIQPQPTAGPRTRGRLHHWLHRLQEAPKKESPGCLEASVTFNLFRLLTRDLNCVASGDLCV

SEQ ID NO: 159 - protein, 423 aa, Artificial
  interferon lambda fusion protein
  misc_feature (396)..(396): Xaa can be any naturally occurring amino acid
MAGPERWGPLLLCLLQAAPGRPRLAPPQNVTLLSQNFSVYLTWLPGLGNPQDVTYFVAYQSSPTRRRWREVEECAGTKELLCSMMCLKKQDLYNKFKGRVRTVSPSSKSPWVESEYLDYLFEVEPAPPVLVLTQTEEILSANATYQLPPCMPPLDLKYEVAFWKEGAGNKTLFPVTPHGQPVQITLQPAASEHHCLSARTIYTFSVPKYSKFSKPTCFLLEVPEANWAGGGGSGGGGSGGGGSGGGGSVPVARLRGALPDARGCHIAQFKSLSPQELQAFKRAKDALEESLLLKDCKCRSRLFPRTWDLRQLQVRERPVALEAELALTLKVLEATADTDPALGDVLDQPLHTLHHILSQLRACIQPQPTAGPRTRGRLHHWLHRLQEAPKKESPGXLEASVTFNLFRLLTRDLNCVASGDLCV

SEQ ID NO: 160 - protein, 423 aa, Artificial
  interferon lambda fusion  protein
  misc_feature (415)..(415): Xaa can be any naturally occurring amino acid
MAGPERWGPLLLCLLQAAPGRPRLAPPQNVTLLSQNFSVYLTWLPGLGNPQDVTYFVAYQSSPTRRRWREVEECAGTKELLCSMMCLKKQDLYNKFKGRVRTVSPSSKSPWVESEYLDYLFEVEPAPPVLVLTQTEEILSANATYQLPPCMPPLDLKYEVAFWKEGAGNKTLFPVTPHGQPVQITLQPAASEHHCLSARTIYTFSVPKYSKFSKPTCFLLEVPEANWAGGGGSGGGGSGGGGSGGGGSVPVARLRGALPDARGCHIAQFKSLSPQELQAFKRAKDALEESLLLKDCKCRSRLFPRTWDLRQLQVRERPVALEAELALTLKVLEATADTDPALGDVLDQPLHTLHHILSQLRACIQPQPTAGPRTRGRLHHWLHRLQEAPKKESPGCLEASVTFNLFRLLTRDLNXVASGDLCV

SEQ ID NO: 161 - protein, 423 aa, Artificial
  interferon lambda fusion protein
  misc_feature (422)..(422): Xaa can be any naturally occurring amino acid
MAGPERWGPLLLCLLQAAPGRPRLAPPQNVTLLSQNFSVYLTWLPGLGNPQDVTYFVAYQSSPTRRRWREVEECAGTKELLCSMMCLKKQDLYNKFKGRVRTVSPSSKSPWVESEYLDYLFEVEPAPPVLVLTQTEEILSANATYQLPPCMPPLDLKYEVAFWKEGAGNKTLFPVTPHGQPVQITLQPAASEHHCLSARTIYTFSVPKYSKFSKPTCFLLEVPEANWAGGGGSGGGGSGGGGSGGGGSVPVARLRGALPDARGCHIAQFKSLSPQELQAFKRAKDALEESLLLKDCKCRSRLFPRTWDLRQLQVRERPVALEAELALTLKVLEATADTDPALGDVLDQPLHTLHHILSQLRACIQPQPTAGPRTRGRLHHWLHRLQEAPKKESPGCLEASVTFNLFRLLTRDLNCVASGDLXV

SEQ ID NO: 162 - protein, 423 aa, Artificial
  interferon lambda fusion protein
  misc_feature (86)..(86): Xaa can be any naturally occurring amino acid
  misc_feature (150)..(150): Xaa can be any naturally occurring amino acid
MAGPERWGPLLLCLLQAAPGRPRLAPPQNVTLLSQNFSVYLTWLPGLGNPQDVTYFVAYQSSPTRRRWREVEECAGTKELLCSMMXLKKQDLYNKFKGRVRTVSPSSKSPWVESEYLDYLFEVEPAPPVLVLTQTEEILSANATYQLPPXMPPLDLKYEVAFWKEGAGNKTLFPVTPHGQPVQITLQPAASEHHCLSARTIYTFSVPKYSKFSKPTCFLLEVPEANWAGGGGSGGGGSGGGGSGGGGSVPVARLRGALPDARGCHIAQFKSLSPQELQAFKRAKDALEESLLLKDCKCRSRLFPRTWDLRQLQVRERPVALEAELALTLKVLEATADTDPALGDVLDQPLHTLHHILSQLRACIQPQPTAGPRTRGRLHHWLHRLQEAPKKESPGCLEASVTFNLFRLLTRDLNCVASGDLCV

SEQ ID NO: 163 - protein, 423 aa, Artificial
  interferon lambda fusiion protein
  misc_feature (86)..(86): Xaa can be any naturally occurring amino acid
  misc_feature (150)..(150): Xaa can be any naturally occurring amino acid
  misc_feature (264)..(264): Xaa can be any naturally occurring amino acid
MAGPERWGPLLLCLLQAAPGRPRLAPPQNVTLLSQNFSVYLTWLPGLGNPQDVTYFVAYQSSPTRRRWREVEECAGTKELLCSMMXLKKQDLYNKFKGRVRTVSPSSKSPWVESEYLDYLFEVEPAPPVLVLTQTEEILSANATYQLPPXMPPLDLKYEVAFWKEGAGNKTLFPVTPHGQPVQITLQPAASEHHCLSARTIYTFSVPKYSKFSKPTCFLLEVPEANWAGGGGSGGGGSGGGGSGGGGSVPVARLRGALPDARGXHIAQFKSLSPQELQAFKRAKDALEESLLLKDCKCRSRLFPRTWDLRQLQVRERPVALEAELALTLKVLEATADTDPALGDVLDQPLHTLHHILSQLRACIQPQPTAGPRTRGRLHHWLHRLQEAPKKESPGCLEASVTFNLFRLLTRDLNCVASGDLCV

SEQ ID NO: 164 - protein, 423 aa, Artificial
  interferon lambda fusion protein
  misc_feature (86)..(86): Xaa can be any naturally occurring amino acid
  misc_feature (150)..(150): Xaa can be any naturally occurring amino acid
  misc_feature (296)..(296): Xaa can be any naturally occurring amino acid
MAGPERWGPLLLCLLQAAPGRPRLAPPQNVTLLSQNFSVYLTWLPGLGNPQDVTYFVAYQSSPTRRRWREVEECAGTKELLCSMMXLKKQDLYNKFKGRVRTVSPSSKSPWVESEYLDYLFEVEPAPPVLVLTQTEEILSANATYQLPPXMPPLDLKYEVAFWKEGAGNKTLFPVTPHGQPVQITLQPAASEHHCLSARTIYTFSVPKYSKFSKPTCFLLEVPEANWAGGGGSGGGGSGGGGSGGGGSVPVARLRGALPDARGCHIAQFKSLSPQELQAFKRAKDALEESLLLKDXKCRSRLFPRTWDLRQLQVRERPVALEAELALTLKVLEATADTDPALGDVLDQPLHTLHHILSQLRACIQPQPTAGPRTRGRLHHWLHRLQEAPKKESPGCLEASVTFNLFRLLTRDLNCVASGDLCV

SEQ ID NO: 165 - protein, 423 aa, Artificial
  interferon lambda fusion proteiin
  misc_feature (86)..(86): Xaa can be any naturally occurring amino acid
  misc_feature (150)..(150): Xaa can be any naturally occurring amino acid
  misc_feature (298)..(298): Xaa can be any naturally occurring amino acid
MAGPERWGPLLLCLLQAAPGRPRLAPPQNVTLLSQNFSVYLTWLPGLGNPQDVTYFVAYQSSPTRRRWREVEECAGTKELLCSMMXLKKQDLYNKFKGRVRTVSPSSKSPWVESEYLDYLFEVEPAPPVLVLTQTEEILSANATYQLPPXMPPLDLKYEVAFWKEGAGNKTLFPVTPHGQPVQITLQPAASEHHCLSARTIYTFSVPKYSKFSKPTCFLLEVPEANWAGGGGSGGGGSGGGGSGGGGSVPVARLRGALPDARGCHIAQFKSLSPQELQAFKRAKDALEESLLLKDCKXRSRLFPRTWDLRQLQVRERPVALEAELALTLKVLEATADTDPALGDVLDQPLHTLHHILSQLRACIQPQPTAGPRTRGRLHHWLHRLQEAPKKESPGCLEASVTFNLFRLLTRDLNCVASGDLCV

SEQ ID NO: 166 - protein, 423 aa, Artificial
  interferon lambda fusion  protein
  misc_feature (86)..(86): Xaa can be any naturally occurring amino acid
  misc_feature (150)..(150): Xaa can be any naturally occurring amino acid
  misc_feature (363)..(363): Xaa can be any naturally occurring amino acid
MAGPERWGPLLLCLLQAAPGRPRLAPPQNVTLLSQNFSVYLTWLPGLGNPQDVTYFVAYQSSPTRRRWREVEECAGTKELLCSMMXLKKQDLYNKFKGRVRTVSPSSKSPWVESEYLDYLFEVEPAPPVLVLTQTEEILSANATYQLPPXMPPLDLKYEVAFWKEGAGNKTLFPVTPHGQPVQITLQPAASEHHCLSARTIYTFSVPKYSKFSKPTCFLLEVPEANWAGGGGSGGGGSGGGGSGGGGSVPVARLRGALPDARGCHIAQFKSLSPQELQAFKRAKDALEESLLLKDCKCRSRLFPRTWDLRQLQVRERPVALEAELALTLKVLEATADTDPALGDVLDQPLHTLHHILSQLRAXIQPQPTAGPRTRGRLHHWLHRLQEAPKKESPGCLEASVTFNLFRLLTRDLNCVASGDLCV

SEQ ID NO: 167 - protein, 423 aa, Artificial
  interferon lambda fusion protein
  misc_feature (86)..(86): Xaa can be any naturally occurring amino acid
  misc_feature (150)..(150): Xaa can be any naturally occurring amino acid
  misc_feature (396)..(396): Xaa can be any naturally occurring amino acid
MAGPERWGPLLLCLLQAAPGRPRLAPPQNVTLLSQNFSVYLTWLPGLGNPQDVTYFVAYQSSPTRRRWREVEECAGTKELLCSMMXLKKQDLYNKFKGRVRTVSPSSKSPWVESEYLDYLFEVEPAPPVLVLTQTEEILSANATYQLPPXMPPLDLKYEVAFWKEGAGNKTLFPVTPHGQPVQITLQPAASEHHCLSARTIYTFSVPKYSKFSKPTCFLLEVPEANWAGGGGSGGGGSGGGGSGGGGSVPVARLRGALPDARGCHIAQFKSLSPQELQAFKRAKDALEESLLLKDCKCRSRLFPRTWDLRQLQVRERPVALEAELALTLKVLEATADTDPALGDVLDQPLHTLHHILSQLRACIQPQPTAGPRTRGRLHHWLHRLQEAPKKESPGXLEASVTFNLFRLLTRDLNCVASGDLCV

SEQ ID NO: 168 - protein, 423 aa, Artificial
  interferon lambda fusion protein
  misc_feature (86)..(86): Xaa can be any naturally occurring amino acid
  misc_feature (150)..(150): Xaa can be any naturally occurring amino acid
  misc_feature (415)..(415): Xaa can be any naturally occurring amino acid
MAGPERWGPLLLCLLQAAPGRPRLAPPQNVTLLSQNFSVYLTWLPGLGNPQDVTYFVAYQSSPTRRRWREVEECAGTKELLCSMMXLKKQDLYNKFKGRVRTVSPSSKSPWVESEYLDYLFEVEPAPPVLVLTQTEEILSANATYQLPPXMPPLDLKYEVAFWKEGAGNKTLFPVTPHGQPVQITLQPAASEHHCLSARTIYTFSVPKYSKFSKPTCFLLEVPEANWAGGGGSGGGGSGGGGSGGGGSVPVARLRGALPDARGCHIAQFKSLSPQELQAFKRAKDALEESLLLKDCKCRSRLFPRTWDLRQLQVRERPVALEAELALTLKVLEATADTDPALGDVLDQPLHTLHHILSQLRACIQPQPTAGPRTRGRLHHWLHRLQEAPKKESPGCLEASVTFNLFRLLTRDLNXVASGDLCV

SEQ ID NO: 169 - protein, 423 aa, Artificial
  interferon lambda fusion protein
  misc_feature (86)..(86): Xaa can be any naturally occurring amino acid
  misc_feature (150)..(150): Xaa can be any naturally occurring amino acid
  misc_feature (422)..(422): Xaa can be any naturally occurring amino acid
MAGPERWGPLLLCLLQAAPGRPRLAPPQNVTLLSQNFSVYLTWLPGLGNPQDVTYFVAYQSSPTRRRWREVEECAGTKELLCSMMXLKKQDLYNKFKGRVRTVSPSSKSPWVESEYLDYLFEVEPAPPVLVLTQTEEILSANATYQLPPXMPPLDLKYEVAFWKEGAGNKTLFPVTPHGQPVQITLQPAASEHHCLSARTIYTFSVPKYSKFSKPTCFLLEVPEANWAGGGGSGGGGSGGGGSGGGGSVPVARLRGALPDARGCHIAQFKSLSPQELQAFKRAKDALEESLLLKDCKCRSRLFPRTWDLRQLQVRERPVALEAELALTLKVLEATADTDPALGDVLDQPLHTLHHILSQLRACIQPQPTAGPRTRGRLHHWLHRLQEAPKKESPGCLEASVTFNLFRLLTRDLNCVASGDLXV

SEQ ID NO: 170 - protein, 420 aa, Artificial
  interferon lambda fusion protein
MAWSLGSWLGGCLLVSALGMVPPPENVRMNSVNFKNILQWESPAFAKGNLTFTAQYLSYRIFQDKCMNTTLTECDFSSLSKYGDHTLRVRAEFADEHSDWVNITFCPVDDTIIGPPGMQVEVLADSLHMRFLAPKIENEYETWTMKNVYNSWTYNVQYWKNGTDEKFQITPQYDFEVLRNLEPWTTYCVQVRGFLPDRNKAGEWSEPVCEQTTHDETVPSGGGGSGGGGSGGGGSGGGGSGGGGSVPVARLRGALPDARGCHIAQFKSLSPQELQAFKRAKDALEESLLLKDCKCRSRLFPRTWDLRQLQVRERPVALEAELALTLKVLEATADTDPALGDVLDQPLHTLHHILSQLRACIQPQPTAGPRTRGRLHHWLHRLQEAPKKESPGCLEASVTFNLFRLLTRDLNCVASGDLCV

SEQ ID NO: 171 - protein, 420 aa, Artificial
  interferon lambda fusion protein
  misc_feature (261)..(261): Xaa can be any naturally occurring amino acid
MAWSLGSWLGGCLLVSALGMVPPPENVRMNSVNFKNILQWESPAFAKGNLTFTAQYLSYRIFQDKCMNTTLTECDFSSLSKYGDHTLRVRAEFADEHSDWVNITFCPVDDTIIGPPGMQVEVLADSLHMRFLAPKIENEYETWTMKNVYNSWTYNVQYWKNGTDEKFQITPQYDFEVLRNLEPWTTYCVQVRGFLPDRNKAGEWSEPVCEQTTHDETVPSGGGGSGGGGSGGGGSGGGGSGGGGSVPVARLRGALPDARGXHIAQFKSLSPQELQAFKRAKDALEESLLLKDCKCRSRLFPRTWDLRQLQVRERPVALEAELALTLKVLEATADTDPALGDVLDQPLHTLHHILSQLRACIQPQPTAGPRTRGRLHHWLHRLQEAPKKESPGCLEASVTFNLFRLLTRDLNCVASGDLCV

SEQ ID NO: 172 - protein, 420 aa, Artificial
  interferon lambda fusion protein
  misc_feature (293)..(293): Xaa can be any naturally occurring amino acid
MAWSLGSWLGGCLLVSALGMVPPPENVRMNSVNFKNILQWESPAFAKGNLTFTAQYLSYRIFQDKCMNTTLTECDFSSLSKYGDHTLRVRAEFADEHSDWVNITFCPVDDTIIGPPGMQVEVLADSLHMRFLAPKIENEYETWTMKNVYNSWTYNVQYWKNGTDEKFQITPQYDFEVLRNLEPWTTYCVQVRGFLPDRNKAGEWSEPVCEQTTHDETVPSGGGGSGGGGSGGGGSGGGGSGGGGSVPVARLRGALPDARGCHIAQFKSLSPQELQAFKRAKDALEESLLLKDXKCRSRLFPRTWDLRQLQVRERPVALEAELALTLKVLEATADTDPALGDVLDQPLHTLHHILSQLRACIQPQPTAGPRTRGRLHHWLHRLQEAPKKESPGCLEASVTFNLFRLLTRDLNCVASGDLCV

SEQ ID NO: 173 - protein, 420 aa, Artificial
  interferon lambda fusion protein
  misc_feature (295)..(295): Xaa can be any naturally occurring amino acid
MAWSLGSWLGGCLLVSALGMVPPPENVRMNSVNFKNILQWESPAFAKGNLTFTAQYLSYRIFQDKCMNTTLTECDFSSLSKYGDHTLRVRAEFADEHSDWVNITFCPVDDTIIGPPGMQVEVLADSLHMRFLAPKIENEYETWTMKNVYNSWTYNVQYWKNGTDEKFQITPQYDFEVLRNLEPWTTYCVQVRGFLPDRNKAGEWSEPVCEQTTHDETVPSGGGGSGGGGSGGGGSGGGGSGGGGSVPVARLRGALPDARGCHIAQFKSLSPQELQAFKRAKDALEESLLLKDCKXRSRLFPRTWDLRQLQVRERPVALEAELALTLKVLEATADTDPALGDVLDQPLHTLHHILSQLRACIQPQPTAGPRTRGRLHHWLHRLQEAPKKESPGCLEASVTFNLFRLLTRDLNCVASGDLCV

SEQ ID NO: 174 - protein, 420 aa, Artificial
  interferon lambda fusion protein
  misc_feature (360)..(360): Xaa can be any naturally occurring amino acid
MAWSLGSWLGGCLLVSALGMVPPPENVRMNSVNFKNILQWESPAFAKGNLTFTAQYLSYRIFQDKCMNTTLTECDFSSLSKYGDHTLRVRAEFADEHSDWVNITFCPVDDTIIGPPGMQVEVLADSLHMRFLAPKIENEYETWTMKNVYNSWTYNVQYWKNGTDEKFQITPQYDFEVLRNLEPWTTYCVQVRGFLPDRNKAGEWSEPVCEQTTHDETVPSGGGGSGGGGSGGGGSGGGGSGGGGSVPVARLRGALPDARGCHIAQFKSLSPQELQAFKRAKDALEESLLLKDCKCRSRLFPRTWDLRQLQVRERPVALEAELALTLKVLEATADTDPALGDVLDQPLHTLHHILSQLRAXIQPQPTAGPRTRGRLHHWLHRLQEAPKKESPGCLEASVTFNLFRLLTRDLNCVASGDLCV

SEQ ID NO: 175 - protein, 420 aa, Artificial
  interferon lambda fusion protein
  misc_feature (393)..(393): Xaa can be any naturally occurring amino acid
MAWSLGSWLGGCLLVSALGMVPPPENVRMNSVNFKNILQWESPAFAKGNLTFTAQYLSYRIFQDKCMNTTLTECDFSSLSKYGDHTLRVRAEFADEHSDWVNITFCPVDDTIIGPPGMQVEVLADSLHMRFLAPKIENEYETWTMKNVYNSWTYNVQYWKNGTDEKFQITPQYDFEVLRNLEPWTTYCVQVRGFLPDRNKAGEWSEPVCEQTTHDETVPSGGGGSGGGGSGGGGSGGGGSGGGGSVPVARLRGALPDARGCHIAQFKSLSPQELQAFKRAKDALEESLLLKDCKCRSRLFPRTWDLRQLQVRERPVALEAELALTLKVLEATADTDPALGDVLDQPLHTLHHILSQLRACIQPQPTAGPRTRGRLHHWLHRLQEAPKKESPGXLEASVTFNLFRLLTRDLNCVASGDLCV

SEQ ID NO: 176 - protein, 420 aa, Artificial
  interferon lambda fusion  protein
  misc_feature (412)..(412): Xaa can be any naturally occurring amino acid
MAWSLGSWLGGCLLVSALGMVPPPENVRMNSVNFKNILQWESPAFAKGNLTFTAQYLSYRIFQDKCMNTTLTECDFSSLSKYGDHTLRVRAEFADEHSDWVNITFCPVDDTIIGPPGMQVEVLADSLHMRFLAPKIENEYETWTMKNVYNSWTYNVQYWKNGTDEKFQITPQYDFEVLRNLEPWTTYCVQVRGFLPDRNKAGEWSEPVCEQTTHDETVPSGGGGSGGGGSGGGGSGGGGSGGGGSVPVARLRGALPDARGCHIAQFKSLSPQELQAFKRAKDALEESLLLKDCKCRSRLFPRTWDLRQLQVRERPVALEAELALTLKVLEATADTDPALGDVLDQPLHTLHHILSQLRACIQPQPTAGPRTRGRLHHWLHRLQEAPKKESPGCLEASVTFNLFRLLTRDLNXVASGDLCV

SEQ ID NO: 177 - protein, 420 aa, Artificial
  interferon lambda fusion protein
  misc_feature (419)..(419): Xaa can be any naturally occurring amino acid
MAWSLGSWLGGCLLVSALGMVPPPENVRMNSVNFKNILQWESPAFAKGNLTFTAQYLSYRIFQDKCMNTTLTECDFSSLSKYGDHTLRVRAEFADEHSDWVNITFCPVDDTIIGPPGMQVEVLADSLHMRFLAPKIENEYETWTMKNVYNSWTYNVQYWKNGTDEKFQITPQYDFEVLRNLEPWTTYCVQVRGFLPDRNKAGEWSEPVCEQTTHDETVPSGGGGSGGGGSGGGGSGGGGSGGGGSVPVARLRGALPDARGCHIAQFKSLSPQELQAFKRAKDALEESLLLKDCKCRSRLFPRTWDLRQLQVRERPVALEAELALTLKVLEATADTDPALGDVLDQPLHTLHHILSQLRACIQPQPTAGPRTRGRLHHWLHRLQEAPKKESPGCLEASVTFNLFRLLTRDLNCVASGDLXV

SEQ ID NO: 178 - protein, 420 aa, Artificial
  interferon lambda fusion protein
  misc_feature (106)..(106): Xaa can be any naturally occurring amino acid
MAWSLGSWLGGCLLVSALGMVPPPENVRMNSVNFKNILQWESPAFAKGNLTFTAQYLSYRIFQDKCMNTTLTECDFSSLSKYGDHTLRVRAEFADEHSDWVNITFXPVDDTIIGPPGMQVEVLADSLHMRFLAPKIENEYETWTMKNVYNSWTYNVQYWKNGTDEKFQITPQYDFEVLRNLEPWTTYCVQVRGFLPDRNKAGEWSEPVCEQTTHDETVPSGGGGSGGGGSGGGGSGGGGSGGGGSVPVARLRGALPDARGCHIAQFKSLSPQELQAFKRAKDALEESLLLKDCKCRSRLFPRTWDLRQLQVRERPVALEAELALTLKVLEATADTDPALGDVLDQPLHTLHHILSQLRACIQPQPTAGPRTRGRLHHWLHRLQEAPKKESPGCLEASVTFNLFRLLTRDLNCVASGDLCV

SEQ ID NO: 179 - protein, 420 aa, Artificial
  interferon lambda fusion  protein
  misc_feature (106)..(106): Xaa can be any naturally occurring amino acid
  misc_feature (261)..(261): Xaa can be any naturally occurring amino acid
MAWSLGSWLGGCLLVSALGMVPPPENVRMNSVNFKNILQWESPAFAKGNLTFTAQYLSYRIFQDKCMNTTLTECDFSSLSKYGDHTLRVRAEFADEHSDWVNITFXPVDDTIIGPPGMQVEVLADSLHMRFLAPKIENEYETWTMKNVYNSWTYNVQYWKNGTDEKFQITPQYDFEVLRNLEPWTTYCVQVRGFLPDRNKAGEWSEPVCEQTTHDETVPSGGGGSGGGGSGGGGSGGGGSGGGGSVPVARLRGALPDARGXHIAQFKSLSPQELQAFKRAKDALEESLLLKDCKCRSRLFPRTWDLRQLQVRERPVALEAELALTLKVLEATADTDPALGDVLDQPLHTLHHILSQLRACIQPQPTAGPRTRGRLHHWLHRLQEAPKKESPGCLEASVTFNLFRLLTRDLNCVASGDLCV

SEQ ID NO: 180 - protein, 420 aa, Artificial
  interferon lambda fusion protein
  misc_feature (106)..(106): Xaa can be any naturally occurring amino acid
  misc_feature (293)..(293): Xaa can be any naturally occurring amino acid
MAWSLGSWLGGCLLVSALGMVPPPENVRMNSVNFKNILQWESPAFAKGNLTFTAQYLSYRIFQDKCMNTTLTECDFSSLSKYGDHTLRVRAEFADEHSDWVNITFXPVDDTIIGPPGMQVEVLADSLHMRFLAPKIENEYETWTMKNVYNSWTYNVQYWKNGTDEKFQITPQYDFEVLRNLEPWTTYCVQVRGFLPDRNKAGEWSEPVCEQTTHDETVPSGGGGSGGGGSGGGGSGGGGSGGGGSVPVARLRGALPDARGCHIAQFKSLSPQELQAFKRAKDALEESLLLKDXKCRSRLFPRTWDLRQLQVRERPVALEAELALTLKVLEATADTDPALGDVLDQPLHTLHHILSQLRACIQPQPTAGPRTRGRLHHWLHRLQEAPKKESPGCLEASVTFNLFRLLTRDLNCVASGDLCV

SEQ ID NO: 181 - protein, 420 aa, Artificial
  interferon lambda fusion protein
  misc_feature (106)..(106): Xaa can be any naturally occurring amino acid
  misc_feature (295)..(295): Xaa can be any naturally occurring amino acid
MAWSLGSWLGGCLLVSALGMVPPPENVRMNSVNFKNILQWESPAFAKGNLTFTAQYLSYRIFQDKCMNTTLTECDFSSLSKYGDHTLRVRAEFADEHSDWVNITFXPVDDTIIGPPGMQVEVLADSLHMRFLAPKIENEYETWTMKNVYNSWTYNVQYWKNGTDEKFQITPQYDFEVLRNLEPWTTYCVQVRGFLPDRNKAGEWSEPVCEQTTHDETVPSGGGGSGGGGSGGGGSGGGGSGGGGSVPVARLRGALPDARGCHIAQFKSLSPQELQAFKRAKDALEESLLLKDCKXRSRLFPRTWDLRQLQVRERPVALEAELALTLKVLEATADTDPALGDVLDQPLHTLHHILSQLRACIQPQPTAGPRTRGRLHHWLHRLQEAPKKESPGCLEASVTFNLFRLLTRDLNCVASGDLCV

SEQ ID NO: 182 - protein, 420 aa, Artificial
  interferon lambda fusion protein
  misc_feature (106)..(106): Xaa can be any naturally occurring amino acid
  misc_feature (360)..(360): Xaa can be any naturally occurring amino acid
MAWSLGSWLGGCLLVSALGMVPPPENVRMNSVNFKNILQWESPAFAKGNLTFTAQYLSYRIFQDKCMNTTLTECDFSSLSKYGDHTLRVRAEFADEHSDWVNITFXPVDDTIIGPPGMQVEVLADSLHMRFLAPKIENEYETWTMKNVYNSWTYNVQYWKNGTDEKFQITPQYDFEVLRNLEPWTTYCVQVRGFLPDRNKAGEWSEPVCEQTTHDETVPSGGGGSGGGGSGGGGSGGGGSGGGGSVPVARLRGALPDARGCHIAQFKSLSPQELQAFKRAKDALEESLLLKDCKCRSRLFPRTWDLRQLQVRERPVALEAELALTLKVLEATADTDPALGDVLDQPLHTLHHILSQLRAXIQPQPTAGPRTRGRLHHWLHRLQEAPKKESPGCLEASVTFNLFRLLTRDLNCVASGDLCV

SEQ ID NO: 183 - protein, 420 aa, Artificial
  interferon lambda fusion protein
  misc_feature (106)..(106): Xaa can be any naturally occurring amino acid
  misc_feature (393)..(393): Xaa can be any naturally occurring amino acid
MAWSLGSWLGGCLLVSALGMVPPPENVRMNSVNFKNILQWESPAFAKGNLTFTAQYLSYRIFQDKCMNTTLTECDFSSLSKYGDHTLRVRAEFADEHSDWVNITFXPVDDTIIGPPGMQVEVLADSLHMRFLAPKIENEYETWTMKNVYNSWTYNVQYWKNGTDEKFQITPQYDFEVLRNLEPWTTYCVQVRGFLPDRNKAGEWSEPVCEQTTHDETVPSGGGGSGGGGSGGGGSGGGGSGGGGSVPVARLRGALPDARGCHIAQFKSLSPQELQAFKRAKDALEESLLLKDCKCRSRLFPRTWDLRQLQVRERPVALEAELALTLKVLEATADTDPALGDVLDQPLHTLHHILSQLRACIQPQPTAGPRTRGRLHHWLHRLQEAPKKESPGXLEASVTFNLFRLLTRDLNCVASGDLCV

SEQ ID NO: 184 - protein, 420 aa, Artificial
  interferon lambda fusion  protein
  misc_feature (106)..(106): Xaa can be any naturally occurring amino acid
  misc_feature (412)..(412): Xaa can be any naturally occurring amino acid
MAWSLGSWLGGCLLVSALGMVPPPENVRMNSVNFKNILQWESPAFAKGNLTFTAQYLSYRIFQDKCMNTTLTECDFSSLSKYGDHTLRVRAEFADEHSDWVNITFXPVDDTIIGPPGMQVEVLADSLHMRFLAPKIENEYETWTMKNVYNSWTYNVQYWKNGTDEKFQITPQYDFEVLRNLEPWTTYCVQVRGFLPDRNKAGEWSEPVCEQTTHDETVPSGGGGSGGGGSGGGGSGGGGSGGGGSVPVARLRGALPDARGCHIAQFKSLSPQELQAFKRAKDALEESLLLKDCKCRSRLFPRTWDLRQLQVRERPVALEAELALTLKVLEATADTDPALGDVLDQPLHTLHHILSQLRACIQPQPTAGPRTRGRLHHWLHRLQEAPKKESPGCLEASVTFNLFRLLTRDLNXVASGDLCV

SEQ ID NO: 185 - protein, 420 aa, Artificial
  interferon lambda fusion protein
  misc_feature (106)..(106): Xaa can be any naturally occurring amino acid
  misc_feature (419)..(419): Xaa can be any naturally occurring amino acid
MAWSLGSWLGGCLLVSALGMVPPPENVRMNSVNFKNILQWESPAFAKGNLTFTAQYLSYRIFQDKCMNTTLTECDFSSLSKYGDHTLRVRAEFADEHSDWVNITFXPVDDTIIGPPGMQVEVLADSLHMRFLAPKIENEYETWTMKNVYNSWTYNVQYWKNGTDEKFQITPQYDFEVLRNLEPWTTYCVQVRGFLPDRNKAGEWSEPVCEQTTHDETVPSGGGGSGGGGSGGGGSGGGGSGGGGSVPVARLRGALPDARGCHIAQFKSLSPQELQAFKRAKDALEESLLLKDCKCRSRLFPRTWDLRQLQVRERPVALEAELALTLKVLEATADTDPALGDVLDQPLHTLHHILSQLRACIQPQPTAGPRTRGRLHHWLHRLQEAPKKESPGCLEASVTFNLFRLLTRDLNCVASGDLXV

SEQ ID NO: 186 - protein, 433 aa, Artificial
  interferon lambda fusion protein
MKLDMTGDCMPVLVLMAAVLTVTGAVPVARLRGALPDARGCHIAQFKSLSPQELQAFKRAKDALEESLLLKDAKCRSRLFPRTWDLRQLQVRERPVALEAELALTLKVLEATADTDPALGDVLDQPLHTLHHILSQLRACIQPQPTAGPRTRGRLHHWLHRLQEAPKKESPGCLEASVTFNLFRLLTRDLNCVASGDLCVGGGGSGGGGSGGGGSGGGGSGGGGSRPRLAPPQNVTLLSQNFSVYLTWLPGLGNPQDVTYFVAYQSSPTRRRWREVEECAGTKELLCSMMCLKKQDLYNKFKGRVRTVSPSSKSPWVESEYLDYLFEVEPAPPVLVLTQTEEILSANATYQLPPCMPPLDLKYEVAFWKEGAGNKTLFPVTPHGQPVQITLQPAASEHHCLSARTIYTFSVPKYSKFSKPTCFLLEVPEANWA

SEQ ID NO: 187 - protein, 421 aa, Artificial
  interferon lambda fusion protein
MKLDMTGDCMPVLVLMAAVLTVTGAVPVARLRGALPDARGCHIAQFKSLSPQELQAFKRAKDALEESLLLKDAKCRSRLFPRTWDLRQLQVRERPVALEAELALTLKVLEATADTDPALGDVLDQPLHTLHHILSQLRACIQPQPTAGPRTRGRLHHWLHRLQEAPKKESPGCLEASVTFNLFRLLTRDLNCVASGDLCVGGGGSGGGGSGGGGSGGGGSMVPPPENVRMNSVNFKNILQWESPAFAKGNLTFTAQYLSYRIFQDKCMNTTLTECDFSSLSKYGDHTLRVRAEFADEHSDWVNITFCPVDDTIIGPPGMQVEVLADSLHMRFLAPKIENEYETWTMKNVYNSWTYNVQYWKNGTDEKFQITPQYDFEVLRNLEPWTTYCVQVRGFLPDRNKAGEWSEPVCEQTTHDETVPS

SEQ ID NO: 188 - protein, 5 aa, Artificial Sequence
  Peptide linker
GGGGS

SEQ ID NO: 189 - protein, 5 aa, Artificial Sequence
  Peptide linker
  misc_feature (1)...(1): Xaa is any amino acid
  misc_feature (2)...(2): Xaa is any amino acid
  misc_feature (3)...(3): Xaa is any amino acid
  misc_feature (4)...(4): Xaa is any amino acid
  misc_feature (5)...(5): Xaa is any amino acid
XXXXX

SEQ ID NO: 190 - protein, 5 aa, Artificial Sequence
  Peptide linker
  misc_feature (2)...(2): Xaa is any amino acid except proline
  misc_feature (4)...(4): Xaa is any amio acid except proline
  misc_feature (5)...(5): Xaa is any amino acid except proline
NXSXX

SEQ ID NO: 191 - protein, 5 aa, Artificial Sequence
  Peptide linker
  misc_feature (1)...(1): Xaa is any amino acid except proline
  misc_feature (3)...(3): Xaa is any amino acid except proline
  misc_feature (5)...(5): Xaa is any amino acid except proline
XNXSX

SEQ ID NO: 192 - protein, 5 aa, Artificial Sequence
  Peptide linker
  misc_feature (1)...(1): Xaa is any amino acid except proline
  misc_feature (2)...(2): Xaa is any amino acid except proline
  misc_feature (4)...(4): Xaa is any amino acid except proline
XXNXS

SEQ ID NO: 193 - protein, 5 aa, Artificial Sequence
  Peptide linker
  misc_feature (2)...(2): Xaa is any amino acid except proline
  misc_feature (4)...(4): Xaa is any amino acid except proline
  misc_feature (5)...(5): Xaa is any amino acid except proline
NXTXX

SEQ ID NO: 194 - protein, 5 aa, Artificial Sequence
  Peptide linker
  misc_feature (1)...(1): Xaa is any amino acid except proline
  misc_feature (3)...(3): Xaa is any amino acid except proline
  misc_feature (5)...(5): Xaa is any amino acid except proline
XNXTX

SEQ ID NO: 195 - protein, 5 aa, Artificial Sequence
  Peptide linker
  misc_feature (1)...(1): Xaa is any amino acid except proline
  misc_feature (2)...(2): Xaa is any amino acid except proline
  misc_feature (4)...(4): Xaa is any amino acid except proline
XXNXT

SEQ ID NO: 196 - protein, 5 aa, Artificial Sequence
  Peptide linker
  misc_feature (2)...(2): Xaa is any amino acid except proline
NXSGS

SEQ ID NO: 197 - protein, 5 aa, Artificial Sequence
  Peptide linker
  misc_feature (3)...(3): Xaa is any amino acid except proline
GNXSS

SEQ ID NO: 198 - protein, 5 aa, Artificial Sequence
  Peptide linker
  misc_feature (4)...(4): Xaa is any amino acid except proline
GGNXS

SEQ ID NO: 199 - protein, 5 aa, Artificial Sequence
  Peptide linker
  misc_feature (2)...(2): Xaa is any amino acid except proline
NXTGS

SEQ ID NO: 200 - protein, 5 aa, Artificial Sequence
  Peptide linker
  misc_feature (3)...(3): Xaa is any amino acid except proline
GNXTS

SEQ ID NO: 201 - protein, 5 aa, Artificial Sequence
  Peptide linker
  misc_feature (4)...(4): Xaa is any amino acid except proline
GGNXT

SEQ ID NO: 202 - protein, 5 aa, Artificial Sequence
  Peptide linker
  misc_feature (2)...(2): Xaa is any amino acid except proline
NXSSG

SEQ ID NO: 203 - protein, 5 aa, Artificial Sequence
  Peptide linker
  misc_feature (3)...(3): Xaa is any amino acid except proline
SNXSG

SEQ ID NO: 204 - protein, 5 aa, Artificial Sequence
  Peptide linker
  misc_feature (4)...(4): Xaa is any amino acid except proline
SSNXS

SEQ ID NO: 205 - protein, 5 aa, Artificial Sequence
  Peptide linker
  misc_feature (2)...(2): Xaa is any amino acid except proline
NXTSG

SEQ ID NO: 206 - protein, 5 aa, Artificial Sequence
  Peptide linker
  misc_feature (3)...(3): Xaa is any amino acid except proline
SNXTG

SEQ ID NO: 207 - protein, 5 aa, Artificial Sequence
  Peptide linker
  misc_feature (4)...(4): Xaa is any amino acid except proline
SSNXT

1. A fusion polypeptide comprising: the amino acid sequence of an interferon λ, or an amino acid sequence variant thereof, linked, directly or indirectly, to the binding domain of an interferon λ receptor, or an amino acid sequence variant thereof.

2. A fusion polypeptide according to claim 1 wherein the variant polypeptide varies by substitution of at least one cysteine amino acid residue.

3. A fusion polypeptide according to claim 2 wherein said cysteine amino acid residue is substituted for an amino acid selected from the group consisting of: aspartic acid, glutamic acid, phenylalanine, glycine, histidine, isoleucine, lysine, leucine, methionine, proline, glutamine, arginine, threonine, valine, tryptophan and tyrosine.

4. A fusion polypeptide according to claim 3 wherein said cysteine substitution is for serine, alanine or asparagine.

5. A fusion polypeptide according to claim 1 wherein said interferon λ is linked to the binding domain of the interferon λ receptor by a peptide linker molecule.

6. A fusion polypeptide according to claim 5 wherein said peptide linker molecule comprises at least 1, 2, 3, 4, 5 or 6 copies of the peptide Gly Gly Gly Gly Ser (SEQ ID NO: 188).

7. A fusion polypeptide according to claim 6 wherein said peptide linker molecule consists of 4 or 5 copies of the peptide Gly Gly Gly Gly Ser (SEQ ID NO: 188).

8. A fusion polypeptide according to claim 5 wherein said peptide linker molecule comprises or consists of one copy of the glycosylation motif Asn-Xaa-Ser or Asn-Xaa-Thr where X is any amino acid except proline.

9. A fusion polypeptide according to claim 8 wherein said peptide linker molecule comprises at least 5 amino acid residues.

10. A fusion polypeptide according to claim 9 wherein said peptide linker molecule comprises 5-50 amino acid residues.

11. A fusion polypeptide according to claim 10 wherein said peptide linker molecule comprises at least one copy of the motif (Xaa₁ Xaa₂ Xaa₃ Xaa₄ Xaa₅; SEQ ID NO: 189) wherein said motif comprises the glycosylation motif Asn-Xaa-Ser or Asn-Xaa-Thr.

12. A fusion polypeptide according to claim 1 wherein said polypeptide does not comprise a peptide linker molecule and is a direct fusion of interferon λ and the interferon λ binding domain of the interferon λ receptor.

13. A fusion polypeptide according to claim 1 wherein said fusion polypeptide comprises an amino acid sequence as represented in SEQ ID NO: 1-3, wherein said polypeptide optionally includes a signal sequence.

14. A fusion polypeptide according to claim 13 wherein interferon λ is represented by SEQ ID NO: 1.

15. A fusion polypeptide according to claim 14 wherein said interferon λ amino acid sequence variant is a modification of amino acid residue cysteine 190 in SEQ ID NO: 1.

16. A fusion polypeptide according to claim 15 wherein cysteine 190 is modified by an amino acid substitution.

17. A fusion polypeptide according to claim 16 wherein said substitution is cysteine 190 for a serine amino acid.

18. A fusion polypeptide according to claim 14 wherein said amino acid sequence variant is a modification of amino acid residue cysteine 34 in SEQ ID NO: 1.

19. A fusion polypeptide according to claim 14 wherein cysteine 34 is modified by an amino acid substitution.

20. A fusion polypeptide according to claim 19 wherein said substitution is cysteine 34 for a serine amino acid.

21. A fusion polypeptide according to claim 14 wherein said interferon λ amino acid sequence variant is a modification of amino acid residue 190 and amino acid residue 34.

22. A fusion polypeptide according to claim 1 wherein interferon λ is represented by SEQ ID NO: 2 or 3.

23. A fusion polypeptide according to claim 22 wherein interferon λ amino acid sequence variant is a modification of amino acid residue cysteine 73 in SEQ ID NO: 2 or 3.

24. A fusion polypeptide according to claim 23 wherein cysteine 73 is modified by an amino acid substitution.

25. A fusion polypeptide according to claim 24 wherein said substitution is cysteine 73 for a serine amino acid.

26. A fusion polypeptide according to claim 24 wherein said substitution is cysteine 73 for an alanine amino acid.

27. A fusion polypeptide according to claim 22 wherein interferon λ amino acid sequence variant is a modification of amino acid residue cysteine 75 in SEQ ID NO: 2 or 3.

28. A fusion polypeptide according to claim 27 wherein said modification is a substitution of cysteine 75 for a serine amino acid.

29. A fusion polypeptide according to claim 1 wherein the interferon binding domain of an interferon receptor is an interferon λ receptor binding domain comprising SEQ ID NO: 4, 5 or 6, wherein said polypeptide optionally includes a signal sequence.

30. A fusion polypeptide according to claim 29 wherein interferon λ is linked to an interferon λ binding domain of an interferon λ receptor and wherein said interferon λ is positioned amino terminal to said binding domain in said fusion polypeptide.

31. A fusion polypeptide according to claim 30 wherein interferon λ is linked to an interferon λ binding domain of an interferon λ receptor and wherein said interferon is positioned carboxyl-terminal to said binding domain in said fusion polypeptide.

32. A fusion polypeptide according to claim 1 wherein said fusion polypeptide comprises an amino acid sequence as represented in SEQ ID NO: 10-187, wherein said polypeptide optionally includes a signal sequence.

33. A homodimer consisting of two polypeptides wherein each of said polypeptides comprises:
i) a first part comprising interferon λ, or a receptor binding domain thereof; and
ii) a second part comprising at least one interferon λ binding domain or part thereof, of an interferon λ receptor.

34. A nucleic acid molecule that encodes a polypeptide according to claim 1.

35. A vector comprising a nucleic acid molecule according to claim 34.

36. A cell transfected or transformed with a vector according to claim 35.

37. A pharmaceutical composition comprising a polypeptide according to claim 1 and an excipient or carrier.

38. A composition according to claim 37 wherein said pharmaceutical composition is combined with a further therapeutic agent.

39. A method to treat a human subject suffering from a viral infection comprising administering an effective amount of a polypeptide according to claim 1.

40. A method according to claim 39 wherein said viral infection is caused by a hepatitis virus.

41. A method according to claim 40 wherein said hepatitis virus is selected from the group consisting of: hepatitis A, B, C, D or E.

42. A method to treat a human subject suffering from cancer comprising administering an effective amount of a polypeptide according to claim 1.
